(19) United States
(12) Patent Application Publication
(10) Pub. No.: US 2015/0323529 A1
(43) Pub. Date: Nov. 12, 2015

(54) MARKER SEQUENCES FOR NEUROMYELITIS OPTICA (NMO) AND USE THEREOF

(71) Applicant: PROTAGEN AG, Dortmund (DE)

(72) Inventors: Heike GÖHLER, Bochum (DE); Marquart KLAUS, Dortmund (DE); Andrew CHAN, Bochum (DE); Peter SCHULZ-KNAPPE, Hannover (DE); Carmen THEEK, Herdecke (DE); Anna TELAAR, Dortmund (DE); Martin GAMER, Dortmund (DE)

(21) Appl. No.: 14/647,513

(22) PCT Filed: Nov. 27, 2013
(86) PCT No.: PCT/EP2013/074915

§ 371 Date: May 27, 2015

(30) Foreign Application Priority Data
Nov. 27, 2012 (EP) 12194508.3

(51) Int. Cl. G01N 33/564; G01N 21/64; G06F 19/24

(52) U.S. Cl. CPC G01N 33/564; G06F 19/24; G01N 21/6486; G01N 2800/285

(57) ABSTRACT

The present invention relates to new markers for Neuromyelitis Optica (NMO), a method for identifying markers for NMO, the use of the markers identified by the method, diagnostic devices, panels of markers, assays, protein arrays comprising markers for NMO and a method for detecting NMO.

[0001] The present invention relates to new markers for Neuromyelitis Optica (NMO), a method for identifying markers for NMO, the use of markers for NMO identified by the method, diagnostic devices, panels of markers, assays, protein arrays comprising the markers for NMO and a method for identifying NMO.

[0002] Protein arrays are gaining increasing industrial importance in analysis and diagnosis as well as in pharmaceutical development. Protein arrays are widely used for example in high throughput screening. The rapid and highly parallel detection of a multiplicity of specifically binding molecules in a single experiment is rendered possible hereby. To produce protein arrays, it is necessary to have the required proteins available.

[0003] Another method for screening, e.g. high-throughput screening, is the well established Luminex® or xMAP® Technology. This method is a bead-based multiplex assay for the analysis of hundreds of analytes per well. This technology combines advanced fluidics, optics, and digital signal processing with microsphere technology to deliver multiplexed assay capabilities.

[0004] xMAP® Technology uses colour-coded tiny beads (“microspheres”, “microsphere particle”). Each bead can be coated with a reagent specific to a particular bioassay, allowing the capture and detection of specific analytes from a sample. Inside an analyzer, e.g. a flow-cytometer like the Luminex® analyzer or Bio-Rad® Bio-Plex® analyzer, a light source excites the internal dyes that identify each bead, and also any reporter dye captured during the assay.

[0005] The colour-coded beads are pre-coated with analyte-specific capture antibody for the molecule of interest, than the analyte can be bound to the antibody. Analyte bound to the antibody immobilized to the bead can be quantitatively detected by a fluorescence-labelled detection antibody.

[0006] The beads are than read on a dual-laser flow-based detection instrument. One laser classifies the bead and determines the analyte that is being detected. The second laser determines the magnitude of the fluorescence signal, which is in direct proportion to the amount of bound analyte.

[0007] Because each bead serves as an individual test, a large number of “different bioassays” can be performed and analyzed simultaneously. And since many readings can be made on each bead set results can be validated.

[0008] Different types of beads can be used in this technology, for example MicroPlex® Microspheres. MicroPlex® Microspheres are carboxylated polystyrene micro-particles that have been dyed into spectrally distinct sets (or regions) allowing them to be individually identified by a flow cytometer, e.g. an xMAP® Instrument. MicroPlex® Microspheres are in addition magnetic which allows them to be separated from a solution quickly.

[0009] Neuromyelitis optica (NMO) or Devic's disease is an inflammatory demyelinating disease of the CNS with severe optic neuritis and myelitis. In that it is very similar to Multiple Sclerosis (MS), but the relationship has been controversial. The NMO-patients suffer from deterioration of the motor functions and as well from deterioration of visual and sensory function. The identification of NMO is very crucial, as the course of the untreated NMO is worse than the course of MS (Kuhle and Petzold, 2011) and requires therefore early diagnosis and therapy.

[0010] Clinical, epidemiological and pathological data have meanwhile demonstrated that MS and NMO are distinct entities. In addition, in 2004 (Lennon et al, 2004) a serum autoantibody has been identified specific for NMO (NMO-IgG), that has been identified as antibody directed against Aquaporin-4 (AQP-4), a high abundant water channel of brain tissue, but as well other tissues.

[0011] The revised diagnostic criteria for NMO have been revised in 2006 (Wingerchuk, 2006). These criteria consider optic neuritis and acute myelitis as absolute criteria and two of the following three criteria as supportive for the diagnosis of NMO: negative brain-MRI at disease onset, contiguous signal abnormalities in spinal cord MRI three or more segment in length and positive NMO-(AQP-4) IgG status.

[0012] These diagnostic criteria have been established using the final clinical diagnosis, but NMO can be confused with e.g. MS early in the course of the disease, but untreated NMO leads faster to disability than MS. Therefore many groups have tried to develop assays to detect AQP-4 antibodies in patient samples to facilitate early diagnosis and treatment. Today, several assays for the detection of AQP-4 antibodies have been developed, showing a high specificity (95%-100% comparing NMO with MS or healthy control groups), but a much lower sensitivity (30%-47%, 54%-91%, (Fazio et al (2009), Waters (2008)).

[0013] Cross Shelly Ann (Journal of Neuro-Ophthalmology, Vol. 27(1), 2007, 57-60) relates to NMO-IgG that targets AQP-4. This antibody was identified using indirect immunofluorescence on a substrate of mouse central nervous system tissue and identified in the sera of patients with NMO and Japanese opticospinal Multiple Sclerosis, a distinctive IgG staining pattern localizing to the blood-brain barrier and partly colocalizing with laminin.

[0014] Benavente, E. and Paira, S. (Curr. Rheumatol. Rep. 13, 2011, 496-505) also refers to the NMO-IgG which targets AQP-4 for diagnosis of NMO.

[0015] Satoh J.-I et al. (Neurobiology of Disease 18, 2005, 537-550) relates to microarry analysis for an aberrant expression of apoptosis and DNA-regulatory genes in Multiple Sklerosis.

[0016] Reynolds et al. (Clinical Chemistry Vol. 49(10), 2003, 1733-1739) refers to early biomarkers in stroke and data analysis by univariate analysis and multivariable regression.

[0017] Herges et al. (Multiple Sclerosis Journal, Vol. 18(4), 2012, 398-408) assessed the blood of NMO patients for NMO markers by using Luminx and Elisa.

[0018] The known marker AQP-4 has several additional disadvantages. For example it is expected, that AQP-4 might be serving as a better marker in women than in men.

[0019] In this respect there is further need to increase the sensitivity of NMO-specific assays and existing demand for indication-specific diagnostic means for the detection of NMO, in particular for differentiating between NMO and MS and for early diagnosis of NMO. There is therefore a need to identify markers for NMO that are directed to different, more specific targets than AQP-4.

[0020] The goal of the present invention was to identify additional markers or auto-antibody signatures that can be used to identify NMO-patients with higher sensitivity and/or an earlier stage of disease, either as stand-alone markers or in combination with AQP-4-antibodies.

[0021] The present invention provides new markers for NMO and for differentiating between NMO and MS. In addition, these markers can be used for early diagnosis of NMO. The identified NMO specific markers of the invention are suitable and can be used for early recognition, detection, diagnosis, prognosis, surveillance of treatment and stratification of patients with NMO and for monitoring of progression or regression of the NMO disease respectively.

[0022] The present invention further provides means comprising these new markers for NMO and the use of the new NMO makers, for example the use of one or more of the new markers in panels of markers, diagnostic devices, text kits or protein arrays.

[0023] The term “Neuromyelitis Optica” (NMO) and Multiple Sclerosis (MS) are defined e.g., according to Pschyrembel, de Gruyter, 263st edition (2012), Berlin.

[0024] According to the invention Neuromyelitis optica (NMO), also known as Devic's disease or Devic's syndrome, is an autoimmune, inflammatory disorder in which a person's own immune system attacks the optic nerves and spinal cord.

[0025] This produces an inflammation of the optic nerve (optic neuritis) and the spinal cord (myelitis). Although inflammation may also affect the brain, the lesions are different from those observed in the related condition, Multiple Sclerosis. Spinal cord lesions lead to varying degrees of weakness or paralysis in the legs or arms, loss of sensation (including blindness), and/or bladder and bowel dysfunction.

[0026] Immunological mechanisms have been implicated as major contributors to the pathological process in NMO. Thus, antibodies may play a critical role in the destructive cascade involved in the pathological process in NMO.

[0027] Assuming immunological mechanisms involved in NMO and the requirements to specific markers, antibodies are candidates for markers in NMO. Antibodies are highly stable proteins, which are easily accessible e.g. in blood or also saliva and can be easily measured with protein microarrays, ELISA, or other methods. For these reasons they could be seen as a good starting point to find candidates for an early diagnosis, with a high sensitivity and specificity and the ability to monitor disease progression.

[0028] With this invention a novel bead-based screening strategy for the discovery of NMO-specific markers and auto-antibodies was developed. According to the invention, sera samples, clinical and other data of NMO patients, MS-diseased and healthy controls were collected and colour-coded beads displaying different human proteins were used for the detection of NMO-specific markers and auto-antibody signatures in human blood.

[0029] The Data for auto-antibody signatures of NMO patients, MS patients and healthy persons (this means persons without MS) was collected and processed by statistical procession analysis thereby leading to the identification of NMO specific marker sequences SEQ ID No. 1 to 261. The new NMO specific markers of the present invention can be used to detect characteristics in the immune profile of NMO patients. They are also suitable for the use to detect differences in the immune profile of different NMO patients and for use in individualized medicine. Due to the novel approach of identification used in this invention, NMO markers with a specificity different to the already known AQP-4 and AQP-4 antibodies were provided. It is the general inventive concept of the invention to identify NMO markers with specific properties and specificity by using the method according to the invention.

[0030] With this invention it was shown that these novel NMO specific markers can discriminate NMO patients from reference groups, in particular between persons with NMO and persons with MS and between persons with NMO and persons without MS. The identified markers SEQ ID No. 1 to 261, partial sequences and homologous thereof can therefore be used to separate between patients with NMO, patients with MS, and healthy controls or persons without MS, respectively.

[0031] All NMO markers according to the invention were identified by a new statistical approach. This common statistical approach comprises at least two steps: univariate analysis and multivariate analysis. In a preferred embodiment of the invention two different approaches of univariate analysis and one approach of multivariate analysis are applied in order to identify the NMO markers. Finally the results of univariant and multivariant analysis are combined leading to the identification of markers that can differentiate between NMO and MS and markers that can differentiate between NMO and healthy or persons without MS, respectively.

[0032] The statistical analysis plan (SAP) underlying the present invention provides a comprehensive and detailed description of strategy and statistical techniques to be used for the analysis of data. The details of the SAP are described in detail below and individual data that illustrate the SAP can be obtained from the examples and tables. A man of skill in the art easily can use and apply this information to identify further suitable markers for NMO.

[0033] The purpose of the SAP underlying the present invention was to ensure the credibility of results by pre-specifying the statistical approaches prior to the analysis of data. The SAP follows the principles of the International Conference on Harmonization (ICH) E3, E6, and E9 and the relevant Standard Operating Procedures (SOPs).

[0034] In a preferred embodiment, the present invention relates to a method for identifying markers for Neuromelitis Optica (NMO) comprising the steps

a) Expose a marker candidate for NMO to sample(s) of NMO patient(s), measure the bonding of the marker candidate by immunofluorescent assay and determine the median fluorescence intensity (MFI) for the marker candidate;
b) Expose the same marker candidate to control sample(s), measure the bonding of the marker candidate by immunofluorescent assay and determine the median fluorescence intensity (MFI) for the marker candidate;
c) Process MFI data from steps a) and b) by univariate analysis;
d) Process MFI data from steps a) and b) by multivariate analysis;
e) Combine the data obtained by univariate analysis and multivariate analysis and identify thereby markers for NMO.

[0035] Another preferred embodiment of the method for identifying markers for Neuromelitis Optica (NMO) comprising the steps

a) Expose a marker candidate for NMO to sample(s) of NMO patient(s), measure the bonding of the marker candidate by immunofluorescent assay and determine the median fluorescence intensity (MFI) for the marker candidate;
b) Expose the same marker candidate to control sample(s), measure the bonding of the marker candidate by immunofluorescent assay and determine the median fluorescence intensity (MFI) for the marker candidate;
c) Process MFI data from steps a) and b) by univariate analysis;
d) Process MFI data from steps a) and b) by multivariate analysis;
e) Combine the data obtained by univariate analysis and multivariate analysis and identify thereby marker(s) for NMO,
f) Select the marker from the group of markers comprising SEQ ID No. 1 to 87 and 262 to 464 (clone sequences), SEQ ID No. 88 to 174 and 465 to 667 (RNA sequences), SEQ ID No. 175 to 261 and 668 to 870 (protein sequences).

[0036] In another embodiment of the method, the marker in step f) of the method is selected from the group comprising SEQ ID No. 1 to 87 and 262 to 464 (clone sequences), SEQ ID No. 88 to 174 and 465 to 667 (RNA sequences), SEQ ID No. 175 to 261 and 668 to 870 (protein sequences), partial sequences of SEQ ID No. 1 to 261 and 262 to 870 and homologous of SEQ ID No. 1 to 261 and 262 to 870, preferably selected from the group of SEQ ID No. 1 to 16, SEQ ID No. 262 to 279, SEQ ID No. 88 to 103, SEQ ID No. 465 to 482, SEQ ID No. 175 to 190, SEQ ID No. 668 to 685, SEQ ID No. 45 to 63, SEQ ID No. 360 to 375, SEQ ID No. 132 to 150, SEQ ID No. 563 to 578, SEQ ID No. 219 to 237, SEQ ID No. 766-785.

[0037] Univariate analysis is the simplest form of quantitative (statistical) analysis. The analysis is carried out with the description of a single variable and its attributes of the applicable unit of analysis. A basic way of presenting univariate data is to create a frequency distribution of the individual cases, which involves presenting the number of attributes of the variable studied for each case observed in the sample. This can be done for example in a table format, with a bar chart or a similar form of graphical representation.

[0038] Multivariate analysis relates to the analysis of multiple variables simultaneously.

[0039] In a preferred embodiment of the invention the following statistical approaches are used:

### 1) Univariate Analysis Based on Exploratory Statistics and Testing:

[0040] The easiest approach for univariate analysis is to check for each antigen separately the discriminating power between two groups. Ranking lists of antigens are provided taking into account the p-value of the univariate Mann-Whitney U test, and exploratory summary statistics such as the absolute median fluorescence intensity (MFI) value within groups, the effect size and the fold-change. Univariate TOP candidates for the separation between NMO patients and healthy controls as well as between NMO patients and MS patients can be identified by the univariate analysis.

### 2) Volcano Plot

[0041] The volcano plot arranges antigens along dimensions of biological relevance and statistical significance. The “edge candidates” in the areas outside the reference lines in the left and right upper corner of the graph show antigens with a high fold-change in either direction and at the same time a low p-value (dots can be marked with numbers). Interesting candidates are than picked up from this type of graph for both comparisons NMO patients vs. healthy controls and NMO patients vs. MS patients.

### 3) Multivariate Analysis—PLS-DA (Also Called “PPLS-DA”)

[0042] The aim of the partial least squares discriminant analysis (“PLS-DA” or “PPLS-DA”) is to extract relevant linear combinations of the antigens for the discrimination between the predefined groups of NMO patients and healthy controls as well as between NMO patients and MS patients. The PPLS-DA starts with all antigens und results in a TOP-list of antigens. This procedure has been run 200 times in order to identify multivariate candidates. With these candidates, the statistical model was run again and TOP antigens can be picked up according to their importance within the set.

### 4) Combination of Analyses

[0043] As all of these procedures produce independent ranking and/or TOP lists, the overlap and the union of respective candidates were built for group comparisons and as well for inclusion and exclusion of AQP-4.

[0044] NMO specific markers were identified by collecting MFI data obtained upon binding of specific markers (e.g. antibodies) to NMO specific substances (e.g. NMO auto-antibodies) in body fluids of NMO patients and processing the obtained MFI data by statistical analysis comprising at least one method of univariate analysis and at least one method of multivariate analysis.

[0045] In one embodiment of the method according to the invention procession of MFI data is performed by univariate analysis based on EST (exploratory statistics and testing) and/or volcano plot.

[0046] In another embodiment of the method according to the invention univariate analysis of MFI data of a marker candidate comprises one or more parameters selected from p-value, fold change, effect size, Fisher's ration, area under the curve (AUC), median absolute MFI within the group, the univariate Mann-Whitney U test.

[0047] In statistical hypothesis testing, the p-value is the probability of obtaining a test statistic at least as extreme as the one that was actually observed, assuming that the null hypothesis is true. When the null hypothesis is rejected, the result is said to be statistically significant.

[0048] In statistics, the Mann-Whitney U test (also called the Mann-Whitney-Wilcoxon (MWW) or Wilcoxon rank-sum test) is a non-parametric statistical hypothesis test for assessing whether one of two samples of independent observations tends to have larger values than the other.

[0049] In another embodiment of the method according to the invention procession of MFI data by multivariate analysis is performed by partial least squares discriminant analysis (PLS-DA) and/or powered PLS-DA.

[0050] Partial least squares regression (PLS regression) is a statistical method that bears some relation to principal components regression. It finds a linear regression model by projecting the predicted variables and the observable variables to a new space.

[0051] In another embodiment of the method according to the invention control samples are selected from healthy persons.

[0052] Healthy persons in the context of the invention are individuals that have no diagnosis of NMO (individuals without NMO). Healthy persons in the context of the invention are individuals that have no diagnosis of MS (individuals without MS). Healthy persons are in the healthy state. In a preferred embodiment of the invention healthy persons are individuals that have no diagnosis of an infection or illness at all. In another embodiment of the invention healthy persons might have an infection or illness, however, this other infection or illness must be different from MS. In a preferred embodiment healthy persons have no diagnosis of MS or NMO.

[0053] In another embodiment of the method according to the invention control samples are selected from persons that have the diagnosis MS.

[0054] Within the scope of this invention, “patient” or “person” means any test subject—human or mammal—with the proviso that the test subject is tested for NMO. The term “patient” means a person that has NMO or is tested positive for NMO. The patients are therefore a subgroup of the persons.

[0055] In another aspect, the present invention relates to markers for NMO identified by the method according to the invention. In a preferred embodiment the invention relates to markers for MNO identified by a method according to the invention and selected from the group comprising SEQ ID No. 1 to 87 and 262 to 464 (clone sequences), SEQ ID No. 88 to 174 and 465 to 667 (RNA sequences), SEQ ID No. 175 to 261 and 668 to 870 (protein sequences), partial sequences of SEQ ID No. 1 to 261 and 262 to 870 and homologous of SEQ ID No. 1 to 261 and 262 to 870, preferably selected from the group of SEQ ID No. 1 to 16, SEQ ID No. 262 to 279, SEQ ID No. 88 to 103, SEQ ID No. 465 to 482, SEQ ID No. 175 to 190, SEQ ID No. 668 to 685, SEQ ID No. 45 to 63, SEQ ID No. 360 to 375, SEQ ID No. 132 to 150, SEQ ID No. 563 to 578, SEQ ID No. 219 to 237, SEQ ID No. 766-785. In a preferred embodiment the invention relates to TOP markers SEQ ID No. 1 to 16 (clone sequence), SEQ ID No. 45 to 63 (clone sequence), SEQ ID No. 262 to 279 (clone sequence), SEQ ID No. 360 to 375 (clone sequence) and the corresponding RNA and/or protein sequences thereof.

[0056] In another embodiment the invention relates to the markers identified by SEQ ID No. 1 to 87 and 262 to 464 (clone sequences), SEQ ID No. 88 to 174 and 465 to 667 (RNA sequences), SEQ ID No. 175 to 261 and 668 to 870 (protein sequences), partial sequences of SEQ ID No. 1 to 261 and 262 to 870 and homologous of SEQ ID No. 1 to 261 and 262 to 870, preferably selected from the group of SEQ ID No. 1 to 16, SEQ ID No. 262 to 279, SEQ ID No. 88 to 103, SEQ ID No. 465 to 482, SEQ ID No. 175 to 190, SEQ ID No. 668 to 685, SEQ ID No. 45 to 63, SEQ ID No. 360 to 375, SEQ ID No. 132 to 150, SEQ ID No. 563 to 578, SEQ ID No. 219 to 237, SEQ ID No. 766-785.

[0057] In another embodiment the invention relates to markers for discriminating MNO from multiple sclerosis and wherein the markers are identified by a method according to the invention and are selected from the group comprising SEQ ID No. 1 to 44 (clone sequences), SEQ ID No. 88 to 131 (RNA sequences), SEQ ID No. 175 to 218 (protein sequences), SEQ ID No. 262 to 359 (clone sequences), SEQ ID No. 465 to 562 (RNA sequences), SEQ ID No. 668 to 765 (protein sequences) partial sequences and homologous thereof, preferably selected from the group of SEQ ID No. 1 to 16, SEQ ID No. 88 to 103, SEQ ID No. 175 to 190, SEQ ID No. 262 to 279, SEQ ID No. 465 to 562, SEQ ID NO. 668 to 765. In a preferred embodiment the invention relates to TOP markers SEQ ID No. 1 to 16, SEQ ID No. 262 to 359 the corresponding RNA sequences SEQ ID No. 88 to 103 and 465 to 562, and the corresponding protein sequences SEQ ID No. 175 to 190 and 668 to 765, partial sequences and homologous thereof.

[0058] In another embodiment the invention relates to markers for discriminating MNO from healthy state and wherein the markers are identified by a method according to the invention and are selected from the group comprising SEQ ID No. 45 to 87 (clone sequences), SEQ ID No. 132 to 174 (RNA sequence), SEQ ID No. 219 to 261 (protein sequence), SEQ ID No. 360 to 464 (clone sequences), SEQ ID No. 563 to 667 (RNA sequence), SEQ ID No. 766 to 870 (protein sequence partial sequences and homologous thereof, preferably selected from the group of SEQ ID No. 45-63, SEQ ID No. 132 to 150, SEQ ID No. 219 to 237, SEQ ID No. 360 to 375, SEQ ID No. 563 to 578, SEQ ID NO. 766 to 785. In a preferred embodiment the invention relates to TOP markers SEQ ID No. 45 to 63, SEQ ID No. 360 to 375 the corresponding RNA sequences SEQ ID No. 132 to 150, SEQ ID No. 563 to 578 and the corresponding protein sequences SEQ ID No. 766 to 785, partial sequences and homologous thereof.

[0059] IN another embodiment the invention relates to the use of the marker sequences selected from the group comprising SEQ ID No. 1 to 87 and 262 to 464 (clone sequences), SEQ ID No. 88 to 174 and 465 to 667 (RNA sequences), SEQ ID No. 175 to 261 and 668 to 870 (protein sequences), partial sequences of SEQ ID No. 1 to 261 and 262 to 870 and homologous of SEQ ID No. 1 to 261 and 262 to 870, preferably selected from the group of SEQ ID No. 1 to 16, SEQ ID No. 262 to 279, SEQ ID No. 88 to 103, SEQ ID No. 465 to 482, SEQ ID No. 175 to 190, SEQ ID No. 668 to 685, SEQ ID No. 45 to 63, SEQ ID No. 360 to 375, SEQ ID No. 132 to 150, SEQ ID No. 563 to 578, SEQ ID No. 219 to 237, SEQ ID No. 766-785 for discrimination of NMO from both, the healthy status and MS, at the same time. Preferably this discrimination can be achieved by using one or more sequences selected from SEQ ID No. 357 to 464, SEQ ID No. 660 to 667, SEQ ID No. 863 to 870, homologous or derivatives thereof.

[0060] In another embodiment the invention relates to markers for diagnosis of MNO selected form the group comprising SEQ ID No. 1 to 87 and 262 to 464 (clone sequences), SEQ ID No. 88 to 174 and 465 to 667 (RNA sequences), SEQ ID No. 175 to 261 and 668 to 870 (protein sequences), partial sequences of SEQ ID No. 1 to 261 and 262 to 870 and homologous of SEQ ID No. 1 to 261 and 262 to 870, preferably selected from the group of SEQ ID No. 1 to 16, SEQ ID No. 262 to 279, SEQ ID No. 88 to 103, SEQ ID No. 465 to 482, SEQ ID No. 175 to 190, SEQ ID No. 668 to 685, SEQ ID No. 45 to 63, SEQ ID No. 360 to 375, SEQ ID No. 132 to 150, SEQ ID No. 563 to 578, SEQ ID No. 219 to 237, SEQ ID No. 766-785, partial sequences and homologous thereof.

[0061] In another embodiment the invention relates to the use of one or more marker(s) selected from the group comprising sequence SEQ ID No. 1 to 87 and 262 to 464 (clone sequences), SEQ ID No. 88 to 174 and 465 to 667 (RNA sequences), SEQ ID No. 175 to 261 and 668 to 870 (protein sequences), partial sequences of SEQ ID No. 1 to 261 and 262 to 870 and homologous of SEQ ID No. 1 to 261 and 262 to 870, preferably selected from the group of SEQ ID No. 1 to 16, SEQ ID No. 262 to 279, SEQ ID No. 88 to 103, SEQ ID No. 465 to 482, SEQ ID No. 175 to 190, SEQ ID No. 668 to 685, SEQ ID No. 45 to 63, SEQ ID No. 360 to 375, SEQ ID No. 132 to 150, SEQ ID No. 563 to 578, SEQ ID No. 219 to 237, SEQ ID No. 766-785 as diagnostic agent, for use in diagnosis of MNO, for prognosis in NMO, for determination of treatment of NMO, for surveillance of treatment of MNO, for stratification in NMO, for therapy control or prediction of prognosis of NMO covering decisions for the treatment and therapy of the patient, in particular the hospitalization of a patient with NMO, for decision of use, effect and/or dosage of one or more drugs, for use as a therapeutic measure or the monitoring of a course of the disease and the course of therapy, for etiology or classification of NMO optionally together with prognosis.

[0062] In a further embodiment of the invention, the markers for NMO according to the invention can likewise be combined, supplemented, fused or expanded likewise with known biomarkers for this indication. In a preferred embodiment of the invention one or more NMO markers of the invention are combined or used together with AQP-4.

[0063] Therefore the present invention also relates to the use of at least one preferably at least two, three or more of the new NMO markers optionally together with other markers, preferably other markers for NMO. The present invention relates for example to the use of combinations of one or more of the new markers SEQ ID No. 1 to 261, partial sequences and/or homologous thereof with AQP-4 as a marker.

[0064] In another embodiment the invention relates to a diagnostic agent or test kit comprising one or more marker(s) for NMO selected from the group comprising sequence SEQ ID No. 1 to 87 and 262 to 464 (clone sequences), SEQ ID No. 88 to 174 and 465 to 667 (RNA sequences), SEQ ID No. 175 to 261 and 668 to 870 (protein sequences), partial sequences of SEQ ID No. 1 to 261 and 262 to 870 and homologous of SEQ ID No. 1 to 261 and 262 to 870, preferably selected from the group of SEQ ID No. 1 to 16, SEQ ID No. 262 to 279, SEQ ID No. 88 to 103, SEQ ID No. 465 to 482, SEQ ID No. 175 to 190, SEQ ID No. 668 to 685, SEQ ID No. 45 to 63, SEQ ID No. 360 to 375, SEQ ID No. 132 to 150, SEQ ID No. 563 to 578, SEQ ID No. 219 to 237, SEQ ID No. 766-785 and optionally further substances and/or additives. In a preferred embodiment AQP-4 is used as additional marker in this connection.

[0065] In another embodiment the invention relates to a panel of markers comprising one or more marker(s) for NMO selected from the group comprising sequence SEQ ID No. 1 to 87 and 262 to 464 (clone sequences), SEQ ID No. 88 to 174 and 465 to 667 (RNA sequences), SEQ ID No. 175 to 261 and 668 to 870 (protein sequences), partial sequences of SEQ ID No. 1 to 261 and 262 to 870 and homologous of SEQ ID No. 1 to 261 and 262 to 870, preferably selected from the group of SEQ ID No. 1 to 16, SEQ ID No. 262 to 279, SEQ ID No. 88 to 103, SEQ ID No. 465 to 482, SEQ ID No. 175 to 190, SEQ ID No. 668 to 685, SEQ ID No. 45 to 63, SEQ ID No. 360 to 375, SEQ ID No. 132 to 150, SEQ ID No. 563 to 578, SEQ ID No. 219 to 237, SEQ ID No. 766-785. In a preferred embodiment AQP-4 is used as additional marker in this connection.

[0066] In another embodiment the invention relates to an assay or protein array comprising a panel of marker(s) according to the invention, characterized in that the marker(s) is/are applied to a solid support, in particular a filter, a membrane, a bead or microsphere like for example a magnetic or fluorophore-labelled bead, a silica wafer, glass, metal, ceramics, plastics, a chip, a target for mass spectrometry or a matrix.

[0067] In another embodiment the invention relates to the use of a panel of markers according to the invention or an assay or protein array according to the invention for the identification and/or validation of an active agent for the prevention or treatment of NMO wherein the panel or the assay or protein array contains means for detecting a binding success, characterized in that the panel or assay or protein array a.) is brought into contact with at least one substance to be tested and b.) a binding success is detected.

[0068] In another aspect the invention relates to a method for detecting MNO comprising the steps

a. providing at least one marker for NMO selected from the group comprising sequence SEQ ID No. 1 to 87 and 262 to 464 (clone sequences), SEQ ID No. 88 to 174 and 465 to 667 (RNA sequences), SEQ ID No. 175 to 261 and 668 to 870 (protein sequences), partial sequences of SEQ ID No. 1 to 261 and 262 to 870 and homologous of SEQ ID No. 1 to 261 and 262 to 870, preferably selected from the group of SEQ ID No. 1 to 16, SEQ ID No. 262 to 279, SEQ ID No. 88 to 103, SEQ ID No. 465 to 482, SEQ ID No. 175 to 190, SEQ ID No. 668 to 685, SEQ ID No. 45 to 63, SEQ ID No. 360 to 375, SEQ ID No. 132 to 150, SEQ ID No. 563 to 578, SEQ ID No. 219 to 237, SEQ ID No. 766-785,
b. bringing it into contact with body fluid or tissue extract of a person, for example a patient and
c. detecting an interaction of the body fluid or tissue extract with the marker(s) from a.).

[0069] In another embodiment the invention relates to a target for the treatment and/or therapy of NMO selected from the group comprising sequence SEQ ID No. 1 to 87 and 262 to 464 (clone sequences), SEQ ID No. 88 to 174 and 465 to 667 (RNA sequences), SEQ ID No. 175 to 261 and 668 to 870 (protein sequences), partial sequences of SEQ ID No. 1 to 261 and 262 to 870 and homologous of SEQ ID No. 1 to 261 and 262 to 870, preferably selected from the group of SEQ ID No. 1 to 16, SEQ ID No. 262 to 279, SEQ ID No. 88 to 103, SEQ ID No. 465 to 482, SEQ ID No. 175 to 190, SEQ ID No. 668 to 685, SEQ ID No. 45 to 63, SEQ ID No. 360 to 375, SEQ ID No. 132 to 150, SEQ ID No. 563 to 578, SEQ ID No. 219 to 237, SEQ ID No. 766-785.

[0070] In a further preferred embodiment of the invention, the invention relates to the diagnosis of NMO, wherein at least one marker is selected from the group of sequences SEQ ID No. 1 to 87 and 262 to 464 (clone sequences), SEQ ID No. 88 to 174 and 465 to 667 (RNA sequences), SEQ ID No. 175 to 261 and 668 to 870 (protein sequences), partial sequences of SEQ ID No. 1 to 261 and 262 to 870 and homologous of SEQ ID No. 1 to 261 and 262 to 870, preferably selected from the group of SEQ ID No. 1 to 16, SEQ ID No. 262 to 279, SEQ ID No. 88 to 103, SEQ ID No. 465 to 482, SEQ ID No. 175 to 190, SEQ ID No. 668 to 685, SEQ ID No. 45 to 63, SEQ ID No. 360 to 375, SEQ ID No. 132 to 150, SEQ ID No. 563 to 578, SEQ ID No. 219 to 237, SEQ ID No. 766-785 and the one or more marker(s) is/are used for detecting one or more auto-antibodies on or from a patient to be examined.

[0071] In a further embodiment at least 2 to 5 or 10, preferably 30 to 50 markers or 50 to 100 or more markers are used to determined NMO specific auto-antibodies/NMO specific auto-antibody profiles on or from a patient to be examined, in particular such NMO markers are selected from the group comprising SEQ ID No. 1 to 87 and 262 to 464 (clone sequences), SEQ ID No. 88 to 174 and 465 to 667 (RNA sequences), SEQ ID No. 175 to 261 and 668 to 870 (protein sequences), partial sequences of SEQ ID No. 1 to 261 and 262 to 870 and homologous of SEQ ID No. 1 to 261 and 262 to 870, preferably selected from the group of SEQ ID No. 1 to 16, SEQ ID No. 262 to 279, SEQ ID No. 88 to 103, SEQ ID No. 465 to 482, SEQ ID No. 175 to 190, SEQ ID No. 668 to 685, SEQ ID No. 45 to 63, SEQ ID No. 360 to 375, SEQ ID No. 132 to 150, SEQ ID No. 563 to 578, SEQ ID No. 219 to 237, SEQ ID No. 766-785.

[0072] In a preferred embodiment, the determination of binding partners (e.g. auto-antibodies) of the NMO specific marker(s) according to the invention is carried out outside the body and the determination is carried out in an ex vivo/in vitro diagnosis. The detection of an interaction of this type can for example be carried out with a probe, in particular by an antibody. The invention therefore likewise relates to the object of providing a diagnostic device or an assay, in particular a protein array, which permits a diagnosis or examination for NMO.

[0073] Furthermore, the invention relates to a method for the stratification, in particular risk stratification and/or therapy control and/or of a patient with NMO wherein at least one binding partner to a marker for NMO is determined on a patient to be examined.

[0074] Furthermore, the stratification of the patients with NMO in new or established subgroups of NMO or MS is also covered, as well as the expedient selection of patient groups for the clinical development of new therapeutic agents. The term therapy control likewise covers the allocation of patients to responders and non-responders regarding a therapy or the therapy course thereof. The present invention therefore also relates to the use of the markers according to the invention for individualized medicine.

[0075] “Diagnosis” for the purposes of this invention means the positive determination of NMO by means of the marker(s) according to the invention as well as the assignment of the patients to NMO. The term diagnosis covers medical diagnostics and examinations in this regard, in particular in-vitro diagnostics and laboratory diagnostics, likewise proteomics and nucleic acid blotting. Further tests can be necessary to be sure and to exclude other diseases. The term diagnosis therefore likewise covers the differential diagnosis of NMO by means of the marker(s) according to the invention and the prognosis of NMO.

[0076] “Stratification” or “therapy control” for the purposes of this invention means that the method according to the invention renders possible decisions for the treatment and therapy of the patient, whether it is the hospitalization of the patient, the use, effect and/or dosage of one or more drugs, a therapeutic measure or the monitoring of a course of the disease and the course of therapy or etiology or classification of a disease, e.g., into a new or existing subtype or the differentiation of diseases and the patients thereof.

[0077] In a further embodiment of the invention, the term “stratification” covers in particular the risk stratification with the prognosis of an outcome of a negative health event.

[0078] The term “marker” for the purposes of this invention means that the protein (polypeptide, peptide) and/or the nucleic acid, e.g. RNA/cDNA/DNA encoding for the polypeptide or protein is significant for NMO. For example, the cDNA or the polypeptide or protein that can be respectively obtained thereof can exhibit an interaction with substances from the body fluid or tissue extract of a patient with NMO (e.g. antigen (epitope)/antibody (paratope) interaction, preferably interaction with an auto-antibody). For the purposes of the invention “wherein at least one marker is selected from SEQ ID No. 1 to 87, SEQ ID No. 88 to 174, SEQ ID No. 175 to 261, partial sequences of SEQ ID No. 1 to 261 and homologous of SEQ ID No. 1 to 261 is determined on a patient to be examined” means that an interaction between the body fluid or tissue extract of a patient and the marker according to the invention is detected. An interaction of this type is, e.g., a bond, in particular a binding substance on at least one marker sequence according to the invention or in the case of a cDNA the hybridization with a suitable substance under selected conditions, in particular stringent conditions (e.g., such as usually defined in J. Sambrook, E. F. Fritsch, T. Maniatis (1989), Molecular cloning: A laboratory manual, 2nd Edition, Cold Spring Harbor Laboratory Press, Cold Spring Harbor, USA or Ausubel, “Current Protocols in Molecular Biology” Green Publishing Associates and Wiley Interscience, N. Y. (1989)). One example of stringent hybridization conditions is: hybridization in 4×SSC at 65° C. (alternatively in 50% formamide and 4×SSC at 42° C.), followed by several washing steps in 0.1×SSC at 65° C. for a total of approximately one hour. An example of less stringent hybridization conditions is hybridization in 4×SSC at 37° C., followed by several washing steps in 1×SSC at room temperature.

[0079] According to the invention, substances (binding partners, e.g. auto-antibodies and/or auto-antibody profiles) of this type are constituents of a body fluid, in particular blood, whole blood, blood plasma, blood serum, patient serum, urine, cerebrospinal fluid, synovial fluid or of a tissue extract.

[0080] In a further embodiment of the invention, however, the binding partners of the markers according to the invention can be represented in a significantly higher or lower amount or concentration in the body fluid or tissue extract of an NMO patient in comparison to for example the healthy state. The difference in concentration or amount can be determined by the markers according to the invention and indicate NMO. The relative sick/healthy expression rates of the binding partners of the NMO markers according to the invention can hereby determined.

[0081] Auto-antibodies that are significant for NMO are either expressed only in case of NMO or the levels of these auto-antibodies vary significantly in case of NMO, e.g. they are more or less expressed in case of NMO in comparison to the levels of the respective autoantibody levels in healthy persons or in comparison to the respective levels in MS. According to the invention the marker can especially be used to determine one or more auto-antibodies or auto-antibody profiles that are specific for NMO, preferably that are specific for early detection of NMO and/or diagnosis of NMO and/or surveillance of the treatment of NMO and/or prognosis of NMO.

[0082] Auto-antibody profiles in this respect relate to the amount of one or more auto-antibodies that are specifically expressed, e.g. up- or down-regulated in NMO. The auto-antibody profiles relate therefore in one aspect to the composition (one or more auto-antibodies) of the profile and in another aspect to the amount or concentration of a particular auto-antibody in NMO.

[0083] In one embodiment of the invention the marker binds to/recognizes one or more auto-antibodies that are more or less expressed during development, establishment, therapy and/or progression of NMO. In order to characterize theses specific auto-antibody profiles one or more markers according to the invention can be used/are necessary.

[0084] The invention comprises the use of at least one NMO marker. in preferred embodiments of the invention two, three, four, five, six seven, eight, nine or ten or more, e.g. 15 or 20 or more markers selected from the group comprising SEQ ID No. 1 to 87 and 262 to 464 (clone sequences), SEQ ID No. 88 to 174 and 465 to 667 (RNA sequences), SEQ ID No. 175 to 261 and 668 to 870 (protein sequences), partial sequences of SEQ ID No. 1 to 261 and 262 to 870 and homologous of SEQ ID No. 1 to 261 and 262 to 870, preferably selected from the group of SEQ ID No. 1 to 16, SEQ ID No. 262 to 279, SEQ ID No. 88 to 103, SEQ ID No. 465 to 482, SEQ ID No. 175 to 190, SEQ ID No. 668 to 685, SEQ ID No. 45 to 63, SEQ ID No. 360 to 375, SEQ ID No. 132 to 150, SEQ ID No. 563 to 578, SEQ ID No. 219 to 237, SEQ ID No. 766-785 are used together or sequentially.

[0085] The markers according to the invention are the subject matter of sequence listing and can be clearly identified by the sequences SEQ ID No. 1-261 and SEQ ID No. 262 to 870 in the sequence listing and from the data in table 1 and table 2.

[0086] According to the invention, the markers also cover those modifications of the cDNA sequence and the corresponding amino acid sequence as chemical modification, such as citrullination, acetylation, phosphorylation, glycosylation or poly(A) strand and other modifications known to one skilled in the art.

[0087] In a further embodiment of the invention, the marker has a recognition signal that is addressed to the substance to be bound (e.g., antibody, autoantibody, nucleic acid). It is preferred according to the invention for a protein the recognition signal is an epitope and/or a paratope and/or a hapten and for a cDNA is a hybridization or binding region.

[0088] In a preferred embodiment of the invention the marker recognizes (e.g. hybridizes, binds) to an autoantibody which is significant for NMO.

[0089] Homologous according to the invention are homologous protein/peptide or nucleic acid sequences, in particular homologous of SEQ ID No. 1-261 that display an identity of at least 70% or 80%, preferred 90% or 95%, most preferred 96% or 98% or more, e.g. 98% or 99% homology with the respective protein, peptide or nucleic acid sequences or the respective partial sequence.

[0090] Partial sequences according to the invention are parts of the respective protein/peptide sequences, in particular partial sequences of those determined by SEQ ID No. 175-261 and SEQ ID No. 668 to 870 and the nucleic acids encoding theses partial proteins, peptides like for example SEQ ID No. 1 to 87 and 262 to 464 (clone sequences), SEQ ID No. 88 to 174 and 465 to 667 (RNA sequences). Partial sequences miss one or more amino acids or nucleotides respectively in comparison to the respective complete sequences. The/these missing part(s) could be located at the beginning, the end or within the sequence. Enclosed are also sequences that contain additional sequence parts at the beginning, the end or within the sequence in comparison to the respective complete sequences.

[0091] In a further embodiment of the invention, partial sequences of the markers according to the invention are likewise covered. In particular those partial sequences that have an identity of 95%, 90%, in particular 80% or 70% with the markers according to the invention.

[0092] Another object of the invention relates to an arrangement of markers (panel) containing at least one marker selected from the group of sequences SEQ ID No. 1 to 87 and 262 to 464 (clone sequences), SEQ ID No. 88 to 174 and 465 to 667 (RNA sequences), SEQ ID No. 175 to 261 and 668 to 870 (protein sequences), partial sequences of SEQ ID No. 1 to 261 and 262 to 870 and homologous of SEQ ID No. 1 to 261 and 262 to 870, preferably selected from the group of SEQ ID No. 1 to 16, SEQ ID No. 262 to 279, SEQ ID No. 88 to 103, SEQ ID No. 465 to 482, SEQ ID No. 175 to 190, SEQ ID No. 668 to 685, SEQ ID No. 45 to 63, SEQ ID No. 360 to 375, SEQ ID No. 132 to 150, SEQ ID No. 563 to 578, SEQ ID No. 219 to 237, SEQ ID No. 766-785. Preferably, the arrangement contains at least 2 to 5 or 10, preferably 30 to 50 markers or 50 to 100 or more markers.

[0093] In a further embodiment, the respective marker can be represented in different quantities in one more regions in a panel e.g. on a solid support. This permits a variation of the sensitivity. The regions can have respectively a totality of markers, i.e. a sufficient number of different markers, in particular 2 to 5 or 10 or more and optionally additional nucleic acids and/or proteins, preferably AQP-4. However, at least 96 to 25,000 (numerical) or more from different or identical markers and further nucleic acids and/or proteins, in particular AQP-4 is preferred. Furthermore preferred are more than 2,500, in particular preferred 10,000 or more different or identical markers and optionally further nucleic acids and/or proteins, in particular AQP-4.

[0094] Within the scope of this invention, “arrangement” is synonymous with “panel” and “array” and if this “array” is used to identify substances or binding partners for the marker(s), this is to be understood to be an “assay” or diagnostic device.

[0095] In a preferred embodiment, the arrangement is designed such that the marker(s) represented on the arrangement are present in the form of a grid on a solid support.

[0096] Furthermore, those arrangements are preferred that permit a high-density arrangement of protein binders and the markers are spotted. Such high-density spotted arrangements are disclosed, for example, in WO 99/57311 and WO 99/57312 and can be used advantageously in a robot-supported automated high-throughput method.

[0097] As used herein, the word “array” or “panel” shall be taken to mean any ordered arrangement of a plurality of specified integers, including both linear and non-liner arrangements of a plurality of proteins and/or nucleic acids.□□ In the present context, the word “array” or “panel” includes any elements derived e.g. from a complex mixture of proteins/nucleic acids resolved by 1-dimensional or 2-dimensional gel electrophoresis or chromatography, or peptide or protein expression libraries and the ordered arrangement of the proteins or nucleic acids on a grid, such as in microtitre wells or on a membrane support or silicon chip or on a grid comprising a plurality of polymeric pins and/or on beads, e.g. magnetic beads.

[0098] The solid support or matrix is typically glass or a polymer, the most commonly used polymers being cellulose, polyacrylamide, nylon, polystyrene, polyvinyl chloride or polypropylene. The solid supports may be in the form of tubes, beads, discs, silicon chips, microplates, polyvinylidene difluoride (PVDF) membrane, nitrocellulose membrane, nylon membrane, other porous membrane, non-porous membrane (eg. plastic, polymer, perspex, silicon, amongst others), a plurality of polymeric pins, or a plurality of microtitre wells, or any other surface suitable for immobilising proteins and/or nucleic acids and/or conducting an assay. The binding processes are well-known in the art and generally consist of cross-linking, covalently binding or physically adsorbing the protein or nucleic acid molecule to the solid support.

[0099] In all of the embodiments, the term “solid support” covers embodiments such as a filter, a membrane, a bead, preferably a magnetic or fluorophore-labeled bead, a silica wafer, glass, metal, ceramics, plastics, a chip, a target for mass spectrometry or a matrix. However, a filter is preferred according to the invention.

[0100] As a filter, furthermore PVDF, nitrocellulose or nylon is preferred (e.g., Immobilon P Millipore, Protran Whatman, Hybond N+Amersham).

[0101] In another preferred embodiment of the arrangement according to the invention, the arrangement corresponds to a grid with the dimensions of a microtiter plate (8-12 wells strips, 96 wells, 384 wells or more), a silica wafer, a chip, a target for mass spectrometry, or a matrix.

[0102] Within the scope of this invention, however, the term “assay” or diagnostic device likewise comprises those embodiments of a device, such as ELISA, bead-based assay, line assay, Western Blot, immunochromatographic methods (e.g., lateral flow immunoassays) or similar immunological single or multiplex detection measures. A protein array in accordance with the invention is a systematic arrangement of proteins on a solid support or a matrix.

[0103] The markers of the arrangement are preferably fixed on a solid support, for example spotted or immobilized or printed on, i.e. applied in a reproducible manner. One or more markers can be present multiple times in the totality of all markers and present in different quantities based on one spot. Furthermore, the markers can be standardized on the solid support.

[0104] The invention therefore further relates to an assay or a protein array comprising an arrangement containing markers according to the invention.

[0105] In a further embodiment, the markers are represented as clones. Clones of this type can be obtained, for example, by means of a cDNA expression library according to the invention (Büssow et al. 1998 (supra)). In a preferred embodiment, such expression libraries containing clones are obtained using expression vectors from a cDNA expression library comprising the cDNA marker sequences. These expression vectors preferably contain inducible promoters. The induction of the expression can be carried out, e.g., by means of an inductor, such as IPTG. Suitable expression vectors are described in Terpe et al. (Terpe T Appl Microbiol Biotechnol. 2003 January; 60(5): 523-33).

[0106] One skilled in the art is familiar with expression libraries, they can be produced according to standard works, such as Sambrook et al, “Molecular Cloning, A laboratory handbook, 2nd edition (1989), CSH press, Cold Spring Harbor, N.Y. Expression libraries are also preferred which are tissue-specific (e.g., human tissue, in particular human organs). Furthermore included according to the invention are expression libraries that can be obtained by exon-trapping. A synonym for expression library is expression bank.

[0107] Also preferred are protein arrays (protein microarrays, protein biochips) or corresponding expression libraries that do not exhibit any redundancy (so-called: Uniclone® library) and that may be produced, for example, according to the teachings of WO 99/57311 and WO 99/57312. These preferred Uniclone libraries have a high portion of non-defective fully expressed proteins of a cDNA expression library.

[0108] Within the context of this invention, the clones can also be, but not limited to, transformed bacteria, recombinant phages or transformed cells from mammals, insects, fungi, yeasts or plants.

[0109] The clones are fixed, spotted or immobilized on a solid support. The invention therefore relates to an arrangement wherein the markers are present as clones.

[0110] Additionally, the markers can be present in the respective form of a fusion protein, which contains, for example, at least one affinity epitope or tag. The tag may be one such as contains c-myc, his tag, arg tag, FLAG, alkaline phosphatase, VS tag, T7 tag or strep tag, HAT tag, NusA, S tag, SBP tag, thioredoxin, DsbA, a fusion protein, preferably a cellulose-binding domain, green fluorescent protein, maltose-binding protein, calmodulin-binding protein, glutathione S-transferase or lacZ.

[0111] In a further embodiment, the invention relates to an assay or a protein array for identifying and characterizing a substance for NMO, characterized in that an arrangement or assay according to the invention is a.) brought into contact with at least one substance to be tested and b.) a binding success is detected. The substance to be tested can be any native or non-native biomolecule, a synthetic chemical molecule, a mixture or a substance library. After the substance to be tested contacts a marker, the binding success is evaluated, which, for example, is carried out using commercially available image analyzing software (GenePix Pro (Axon Laboratories), Aida (Ray test), ScanArray (Packard Bioscience).

[0112] The visualization of protein-protein interactions according to the invention (e.g., protein on marker, as antigen/antibody, e.g. autoantibody) or corresponding “means for detecting the binding success” can be performed, for example, using fluorescence labelling, biotinylation, radioisotope labelling or colloid gold or latex particle labelling in the usual way. A detection of bound antibodies is carried out with the aid of secondary antibodies, which are labelled with commercially available reporter molecules (e.g., Cy, Alexa, Dyomics, FITC or similar fluorescent dyes, colloidal gold or latex particles), or with reporter enzymes, such as alkaline phosphatase, horseradish peroxidase, etc., and the corresponding colorimetric, fluorescent or chemiluminescent substrates. Readout is conducted, e.g., using a microarray laser scanner, a CCD camera or visually.

[0113] In a further embodiment, the invention relates to a drug/active substance or prodrug developed for NMO and obtainable through the use of the assay or protein array according to the invention.

[0114] In a further embodiment, the invention likewise relates to the use of the marker according to the invention, preferably in the form of an arrangement, as an affinity material for carrying out an apheresis or in the broadest sense a blood lavage, wherein substances from body fluids of a patient with NMO, such as blood or plasma, bind to the markers according to the invention and consequently can be selectively withdrawn from the body fluid.

[0115] The invention further relates to the use of one or more markers for NMO selected from the group comprising SEQ ID No. 1 to 87 and 262 to 464 (clone sequences), SEQ ID No. 88 to 174 and 465 to 667 (RNA sequences), SEQ ID No. 175 to 261 and 668 to 870 (protein sequences), partial sequences of SEQ ID No. 1 to 261 and 262 to 870 and homologous of SEQ ID No. 1 to 261 and 262 to 870, preferably selected from the group of SEQ ID No. 1 to 16, SEQ ID No. 262 to 279, SEQ ID No. 88 to 103, SEQ ID No. 465 to 482, SEQ ID No. 175 to 190, SEQ ID No. 668 to 685, SEQ ID No. 45 to 63, SEQ ID No. 360 to 375, SEQ ID No. 132 to 150, SEQ ID No. 563 to 578, SEQ ID No. 219 to 237, SEQ ID No. 766-785 for screening of drugs and active compounds for treatment of NMO.

[0116] The invention is further described in the following examples and tables, however, without restricting the invention to these examples and tables. All of them are generated according to the SAP of the invention. All tables and data listings are presented in Landscape Orientation.

### EXAMPLES

### Example 1

### Measurement principle

[0117] In this study, the bead-based Luminex xMAP® Technology is used for the detection of auto-antibodies in serum samples derived from endometriosis patients.

[0118] In a bead-based assay, a set of different fluorescent colour-coded magnetic polystyrene microspheres (MagPlex®) is used, allowing the simultaneous analysis of up to 500 analytes in a single approach by the Luminex FlexMap3D device. Each colour-coded bead is covalently linked to a specific antigen. During serum sample incubation, autoantibodies present in the serum sample bind to the coupled antigens on the beads and can be quantitatively detected by a fluorescence-labelled (e.g. phycoerythrin) detection antibody.

[0119] The Luminex FlexMap3D device is based on the principle of flow cytometry using a dual-laser system to identify the specific bead colour with a 635 nm red laser and the signal strength of reporter molecules with a 532 nm green laser.

### 1.1. Coupling Procedure

[0120] Histidine-tagged antigens are purified under denaturing conditions and cross-linked to magnetic microspheres (MagPlex®) using standard bead coupling procedure (WI 3-17-1.03 Ver01). The coupling reaction is performed in a semi-automated fashion with a Freedom Evo® 150 liquid handling roboter (Tecan). The carboxylated beads are activated with EDC and Sulfo-NHS and up to 12.5 μg of protein is subjected to the activated beads forming covalent peptide bonds between the carboxyl groups of the bead and primary amines of the protein.

[0121] Proteins, which will be coupled, have to fulfil following conditions to enable successful bead coupling and quality control.

Requirements of protein conditions

| | |
|---|---|
| Buffer conditions: | amine-free buffer (w/o Tris, lysine, |
| | glycine, ethanolamine); pH < 8.0 |
| Protein amount: | 100 μg |
| Protein concentration: | >0.25 μg/μl |
| Protein conditions: | HIS-tagged proteins |
| Protein detection (QC) : | Penta-HIS antibody |

[0122] Coupled beads of 400 different colour-codes are combined to a bead mix. The bead mixes are stored at 4° C. in the dark. The coupling efficiency is controlled according to the working instruction (WI 3-17-2.02 Ver02) using an anti-penta-His antibody (Qiagen) and a secondary PE-conjugated anti-mouse antibody (Dianova).

[0123] Internal control beads are used to monitor the assay performance of each well. Hence, beads coupled with human IgG (Sigma) and mouse IgG (Sigma) are added to each bead mix controlling the accuracy of goat-anti-human-PE or goat-anti-mouse-PE detection antibodies, respectively.

### 1.2. Antigen-Autoantibody Assay

[0124] The antigen-autoantibody assay is performed according to the working instructions (WI 3-17-3.03 Ver01, WI 3-17-3.04 Ver02) in a semi-automated fashion using the liquid handling workstations MICROLAB® STARlet (Hamilton) and Freedom Evo® 150 (Tecan).

[0125] Serum samples are thawed and re-arrayed in the appropriate format for the bead-based assay using the MICROLAB® STARlet followed by a 1:100 dilution in assay buffer using the Freedom Evo® 150.

[0126] The bead mix is analyzed with all serum samples. After distributing the bead mixes in the microtiter plates the 1:100 diluted serum samples are applied for 22 hours at 4° C. Unbound human auto-antibodies of the serum samples are removed by washing. Bound human auto-antibodies are quantitatively labelled by a PE-labelled goat-anti-human IgG antibody (Dianova) followed by washing cycles of the beads. The median fluorescence intensities (MFI) of the detection antibody is analyzed for each bead using the FiexMAP 3D instrument.

[0127] For the calculation of intra- and inter-plate CVs three replicates of selected serum samples are measured on each assay plate.

### Example 2

### Study Design

### 2.1. Analysis Groups

[0128] There are three different analysis groups within the study. The following groups will be considered (n=number of different samples, each sample belongs to a different patient/person):

NMO (n=12)
MS (n=18)
healthy controls (n=12)

### 2.2. Randomization and Blinding

[0129] This is an open study, so no blinding on a patient level is possible. Nevertheless, allocation of serum samples on plates followed a block randomization scheme in which matched pairs (patient and control, if applicable) were randomly arranged.

### 2.3. Measurement Quality

[0130] The entire processes including bead coupling, coupling control and the antigen-autoantibody assay are performed according to Protagen's working instructions.

[0131] Coefficients of variation (CV) will be determined and will be shown for inter- and intra-plate variation in form of histograms and boxplots. Besides, the bead count distribution will be presented analogously.

### 2.4. Analysis Population

[0132] All samples available according to the setting described above will be included, no further definition of analysis populations is necessary for this exploratory approach.

### Example 3

### Collection and Procession of Data

### 3.1. Data Base

[0133] Laboratory raw data are available in CSV-format showing relevant MFI values by sample number. Additionally, demographic data are available such as age and gender. All data will be transferred to the R environment for statistical evaluation. Analysis data sets will be generated in the context of data management.

[0134] In total, the data base consists of 42 samples: 12 NMO samples, 12 healthy controls, and 18 MS samples coming from one screen.

[0135] No course over time will be monitored, i.e. one observation per patient or healthy control is available.

[0136] In total, 384 antigens were documented, thereof 247 will be considered for the analysis.

### 3.2. Analysis Variables

[0137] The MFT of the detection antibody is the target variable for all analyses. Values are considered for 247 antigens in total. Demographic data will only be used to check homogeneity within the analysis population. No further variables will be considered.

[0138] The aim of this study is to answer the question whether the immune profile is able to separate between patients with NMO, patients with MS, and healthy controls. Special interest is on AQP-4 as a marker and potentially accompanying additional or alternative markers.

[0139] Therefore, the following objectives will be addressed:

[0140] The immune profile for different indications will be investigated and compared. Possible discrimination between the following groups will be analyzed:

NMO vs healthy controls and NMO vs MS

### 3.3. Data Pre-Processing

### 3.3.1. Replicates

[0141] If replicates are present, the first measurement values will be used for statistical analyses.

### 3.3.2. Transformation

[0142] For MFI values are log₂ transformed before normalization. As long as the statistical method requires log-transformed values, the transformed values are maintained. All other analyses are based on the back-transformed MFI values.

### 3.3.3. Handling of Missing Values

[0143] Total amount of employed beads is optimized, targeting at ≧100 beads counted for each measured antigen. Observations from previous studies show that MFI values are unreliable for a specific antigen if less than 10 beads are counted. These cases are rare, and the corresponding MFI value is set to missing. The numbers of missing values will be reported for each antigen and sample. Samples or antigens are discarded from further analysis if

1) there are more than 20% missing values for a sample,
2) there are more than 20% missing values for an antigen.

[0144] Samples or antigens excluded from further analysis will be reported.

[0145] Missing values for an antigen will be replaced after normalization and back-transformation by median imputation, i.e. by the median MFI value measured in all samples for this antigen.

### 3.3.4. Normalization

[0146] Normalization is applied after log₂ transformation. On each Luminex plate, three reference sera are measured serving as quality control and normalization reference for plate-specific measurement differences. To this end, the median of each antigen is calculated from all reference samples on a plate, yielding the median reference for this individual plate. An overall median reference based on all measured plates is calculated analogously. Quantile normalization is used to normalize all measured samples on the individual plate by BBA set.

### 3.3.4. Statistical Analysis

[0147] The complete statistical analysis will be carried out for two group comparisons:
[0148] NMO vs. healthy controls
[0149] NMO vs. MS

[0150] Multivariate methods will only be applied as long as the number of samples is sufficient.

### Example 4

### Statistical Analysis

### 4.1. Univariate Analysis

[0151] Summary statistics will be determined for all MFI results for all antigens separately for all three groups: NMO, MS and healthy controls. (Note: not log-transformed values but original values to be used)

[0152] The median will be determined as a representative parameter for location.

[0153] Group comparison will be performed between results derived from NMO patients in comparison to healthy controls, and additionally in comparison to MS patients. The following system of hypotheses will be investigated for the log₂ transformed MFI values for each antigen j, j=1, . . . , J:

H₀ⱼ: The medians of log₂ transformed MFI values are identical in the two groups.
H₁ⱼ: The medians of log_{z} transformed MFI values differ between the two groups.

[0154] Besides, the fold change (=ratio) between the two groups will be determined.

[0155] The effect size will be calculated as the ratio of the absolute value of mean difference between the two groups and the respective standard deviation.

[0156] A receiver operating characteristic (ROC) curve will be constructed. Sensitivity, specificity and the area under the curve (AUC) will be estimated together with the respective bootstrapped 95% confidence intervals.

[0157] The TOP candidates will be identified for further investigation taking into account the following characteristics as decision criteria:
[0158] P-value (TOP 30 rank)
[0159] Fold change (at least 2-fold)
[0160] Effect size (TOP 30 rank)
[0161] Fisher's ratio (TOP 30 rank)
[0162] AUC resulting from ROC analysis (at least 0.75)
[0163] Median absolute MFI value in at least one treatment group >500
[0164] Median absolute MFI value in at least one treatment group >1000

[0165] A scoring system will be implemented: The criteria mentioned above will be treated as binary variables, so that one scoring point will be given if the respective criterion is fulfilled. The score will present the sum of all scoring points.

[0166] TOP candidates will be ranked according to this scoring system. In case of ties the second variable for ranking is the p-value, so that a clear cut-off for the univariate TOP 30 candidates within the list is possible.

[0167] The ranking list will be provided for the comparison between NMO and healthy controls and additionally for the comparison between NMO and MS.

### 4.2. Graphical Display

[0168] The volcano plot will visualize a part the univariate results for all antigens at a glance. A volcano plot arranges antigens along dimensions of biological relevance and statistical significance. The horizontal dimension is the fold change between the two groups on a log₂ scale, so that up and down regulation appear symmetric, and the vertical axis represents the p-value for a Mann-Whitney U test of differences between samples on a negative log₁₀ scale, so that smaller p-values appear higher up. The horizontal axis indicates biological relevance of the difference, the vertical axis indicates the statistical significance. Judgment about promising candidates is possible by trading off both these criteria by eye. Reference lines are implemented at −1 and 1 (reflecting a 2-fold change in either direction) on the horizontal axis and at 1.3 (reflecting a p-value of 0.05) on the vertical axis.

[0169] The “edge candidates” coming from the areas outside the reference lines (left and right upper corner) will be listed with gene-ID, gene name and log₂ (ratio) and −log₁₀ (p-value)

[0170] Graphs and listings will be provided for the comparison between NMO patients and healthy controls, and the same visualizations will be given for NMO patients in comparison to MS patients.

### 4.3. Multivariate Analysis

[0171] Partial least squares discriminant analysis (PLS-DA) is partial least squares regression adapted to classification tasks. The aim is to extract relevant components (linear combination of the variables) for the discrimination between the predefined groups. This technique is especially suited to deal with a much larger number of predictors than observations and with multicollinearity, two of the main problems encountered when analyzing expression data.

[0172] Powered partial least squares discriminant analysis is a specialized version of the method PLS-DA. One aspect different from PLS-DA is, that a so called power parameter is fitted in order to maximize the correlation between the latent components and the response matrix (dummy coded group memberships). For the final classification a linear discriminant analysis is applied with the latent components as predictors.

[0173] The PLS-DA will start with all antigens und result in a TOP-list of 30 antigens. Cross validation will be implemented with a number of 200 runs.

[0174] An evaluation over these 200 runs will summarize the ranking based on the frequency of TOP 30 ranks for each antigen and the median value for the rank. An antigen is qualified for the multivariate panel if the frequency of TOP 30 ranks is at least 100, or the frequency is at least 100 and the median rank is not higher than 16.

[0175] For this panel a PLS-DA (also “PPLS-DA”) will be applied with focus on the first component and the results will be shown in form of a score plot, an importance plot, and a ranking list based on the loading weights.

[0176] As the number of samples available is very small, this analysis will be carried out only as supportive. On the one hand all antigens will be used within the PPLS-DA, on the other hand AQP-4 will be left out to investigate a possible difference. Graphical display of results will be provided.

[0177] The two groups for comparison will be NMO and healthy controls. An analysis for NMO patients in comparison to MS patients will be carried out analogously.

### 4.4. Combination of Results

[0178] In order to get an overview of the candidate lists based on different statistical analyses the results will be pooled. The overlap of panels from univariate (Scoring and “Edge candidates” resulting from Volcano plot) and multivariate analysis will be presented for the two comparisons NMO patients versus healthy controls and NMO patients versus MS patients. Analogously, the respective union of panels will be presented.

### 4.5. Software

[0179] In-house developed software is used to perform Luminex raw data file parsing to produce an easy readable CSV file that is suitable as input for further statistical analysis software. All statistical analyses are performed within the R project for statistical computing, http://www.r-project.org/ version R-2.14.0 (2011 Oct. 31).

TABLE 1
Markers for NMO identified by statistical analysis of MFI data from NMO vs MS. The
sequence of the markers can be obtained from the enclosed sequence listening.

| SEQ | Marker | | | |
|---|---|---|---|---|
| ID No. | Classification | GeneID | Gene Name | Gene Symbol |
| 1 | TOP Marker | 4775 | nuclear factor of activated T-cells, cytoplasmic, calcineurin-dependent 3 | NFATC3 |
| 2 | TOP Marker | 5982 | replication factor C (activator 1) 2, 40 kDa | RFC2 |
| 3 | TOP Marker | — | Homo sapiens cDNA clone IMAGE: 30377818 5′mRNA sequence | — |
| 4 | TOP Marker | 64129 | tubulointerstitial nephritis antigen-like 1 | TINAGL1 |
| 5 | TOP Marker | 10436 | EMG1 nucleolar protein homolog (S. cerevisiae) | EMG1 |
| 6 | TOP Marker | 6434 | transformer 2 beta homolog (Drosophila) | TRA2B |
| 7 | TOP Marker | 65109 | UPF3 regulator of nonsense transcripts homolog B (yeast) | UPF3B |
| 8 | TOP Marker | 6152 | ribosomal protein L24 | RPL24 |
| 9 | TOP Marker | 6838 | surfeit 6 | SURF6 |
| 10 | TOP Marker | 23608 | makorin ring finger protein 1 | MKRN1 |
| 11 | TOP Marker | 4155 | myelin basic protein | MBP |
| 12 | TOP Marker | 1938 | eukaryotic translation elongation factor 2 | EEF2 |
| 13 | TOP Marker | 27344 | proprotein convertase subtilisin/kexin type 1 inhibitor | PCSK1N |
| 14 | TOP Marker | — | OOF4155 | — |
| 15 | TOP Marker | — | OOF1938 | — |
| 16 | TOP Marker | — | OOF27344 | — |
| 17 | Marker | 58506 | SR-related CTD-associated factor 1 | SCAF1 |
| 18 | Marker | 324 | adenomatous polyposis coli | APC |
| 19 | Marker | 90861 | hematological and neurological expressed 1-like | HN1L |
| 20 | Marker | 119032 | chromosome 10 open reading frame 32 | C10orf32 |
| 21 | Marker | 84893 | F-box protein, helicase, 18 | FBXO18 |
| 22 | Marker | 10569 | SLU7 splicing factor homolog (S. cerevisiae) | SLU7 |
| 23 | Marker | 57455 | REX1, RNA exonuclease 1 homolog (S. cerevisiae) | REXO1 |
| 24 | Marker | 6461 | Src homology 2 domain containing adaptor protein B | SHB |
| 25 | Marker | 79155 | TNFAIP3 interacting protein 2 | TNIP2 |
| 26 | Marker | 339230 | coiled-coil domain containing 137 | CCDC137 |
| 27 | Marker | 23646 | phospholipase D family, member 3 | PLD3 |
| 28 | Marker | 11019 | lipoic acid synthetase | LIAS |
| 29 | Marker | 6130 | ribosomal protein L7a | RPL7A |
| 30 | Marker | 5831 | pyrroline-5-carboxylate reductase 1 | PYCR1 |
| 31 | Marker | 4122 | mannosidase, alpha, class 2A, member 2 | MAN2A2 |
| 32 | Marker | 51510 | chromatin modifying protein 5 | CHMP5 |
| 33 | Marker | 375690 | WAS protein family homolog 5 pseudogene | WASH5P |
| 34 | Marker | 3068 | hepatoma-derived growth factor | HDGF |
| 35 | Marker | 128866 | chromatin modifying protein 4B | CHMP4B |
| 36 | Marker | 7416 | voltage-dependent anion channel 1 | VDAC1 |
| 37 | Marker | 2037 | erythrocyte membrane protein band 4.1-like 2 | EPB41L2 |
| 38 | Marker | 4924 | nucleobindin 1 | NUCB1 |
| 39 | Marker | 7431 | vimentin | VIM |
| 40 | Marker | 10081 | programmed cell death 7 | PDCD7 |
| 41 | Marker | — | OOF2037 | — |
| 42 | Marker | — | OOF4924 | — |
| 43 | Marker | — | OOF7431 | — |
| 44 | Marker | — | OOF10081 | — |
| 262 | TOP Marker | 80152 | centromere protein T | CENPT |
| 263 | TOP Marker | 6895 | TAR (HIV-1) RNA binding protein 2 | TARBP2 |
| 264 | TOP Marker | 23080 | AVL9 homolog (S. cerevisiae) | AVL9 |
| 265 | TOP Marker | 6834 | surfeit 1 | SURF1 |
| 266 | TOP Marker | 2114 | v-ets erythroblastosis virus E26 oncogene homolog 2 (avian) | ETS2 |
| 267 | TOP Marker | 23404 | exosome component 2 | EXOSC2 |
| 268 | TOP Marker | 10155 | tripartite motif-containing 28 | TRIM28 |
| 269 | TOP Marker | 31 | acetyl-Coenzyme A carboxylase alpha | ACACA |
| 270 | TOP Marker | 8897 | mytubularin related protein 3 | MTMR3 |
| 271 | TOP Marker | 151313 | fumarylacetoacetate hydrolase domain containing 2B | FAHD2B |
| 272 | TOP Marker | 53343 | nudix (nucleoside diphosphate linked moiety X)-type motif 9 | NUDT9 |
| 273 | TOP Marker | 10807 | serologically defined colon cancer antigen 3 | SDCCAG3 |
| 274 | TOP Marker | 92922 | Homo sapiens coiled-coil domain containing 102A, mRNA (cDNA clone | CCDC102A |
| | | | MGC: 10992 IMAGE: 3637387), complete cds | |
| 275 | TOP Marker | 3707 | inositol 1,4,5-trisphosphate 3-kinase B | ITPKB |
| 276 | TOP Marker | 51019 | coiled-coil domain containing 53 | CCDC53 |
| 277 | TOP Marker | 51780 | lysine (K)-specific demethylase 3B | KDM3B |
| 278 | TOP Marker | 26146 | TNF receptor-associated factor 3 interacting protein 1 | TRAF3IP1 |
| 279 | TOP Marker | 1410 | crystallin, alpha B | CRYAB |
| 280 | Marker | 3329 | heat shock 60 kDa protein 1 (chaperonin) | HSPD1 |
| 281 | Marker | 64946 | centromers protein H | CENPH |
| 282 | Marker | 11237 | ring finger protein 24 | RNF24 |
| 283 | Marker | 728621 | coiled-coil domain containing 30 | CCDC30 |
| 284 | Marker | 7917 | Homo sapiens BCL2-associated athanogene 6 (BAG6), | BAG6 |
| | | | transcript variant 5, mRNA | |
| 285 | Marker | 5827 | peroxisomal membrane protein 2, 22 kDa | PXMP2 |
| 286 | Marker | 79921 | transcription elongation factor A (SII)-like 4 | TCEAL4 |
| 287 | Marker | 80263 | tripartite motif-containing 45 | TRIM45 |
| 288 | Marker | 23170 | tubulin tyrosine ligase-like family, member 12 | TTLL12 |
| 289 | Marker | 26088 | golgi associated, gamma adaptin ear containing, ARF BP1 | GGA1 |
| 290 | Marker | 23743 | betaine-homocysteine methyltransferase 2 | BHMT2 |
| 291 | Marker | 55689 | YEATS domain containing 2 | YEATS2 |
| 292 | Marker | 6814 | syntaxin binding protein 3 | STXBP3 |
| 293 | Marker | 2159 | coagulation factor X | F10 |
| 294 | Marker | 28987 | NIN1/RPN12 binding protein 1 homolog (S. cerevisiae) | NOB1 |
| 295 | Marker | 4597 | mevalonate (diphospho) decarboxylase | MVD |
| 296 | Marker | 2803 | golgi autoantigen, golgin subfamily a, 4 | GOLGA4 |
| 297 | Marker | 23268 | dynamin binding protein | DNMBP |
| 298 | Marker | 6730 | signal recognition particle 68 kDa | SRP68 |
| 299 | Marker | 140465 | myosin, light chain 6B, alkali, smooth muscle and non-muscle | MYL6B |
| 300 | Marker | 5912 | RAP2B, member of RAS oncogene family | RAP2B |
| 301 | Marker | 784 | calcium channel, voltage-dependent, beta 3 subunit | CACNB3 |
| 302 | Marker | 79791 | F-box protein 31 | FBXO31 |
| 303 | Marker | 10180 | RNA binding motif protein 6 | RBM6 |
| 304 | Marker | 2173 | fatty acid binding protein 7, brain | FABP7 |
| 305 | Marker | 6426 | splicing factor, arginine/serine-rich 1 | SFRS1 |
| 306 | Marker | 6429 | splicing factor, arginine/serine-rich 4 | SFRS4 |
| 307 | Marker | 7316 | ubiquitin C | UBC |
| 308 | Marker | 5590 | protein kinase C, zeta | PRKCZ |
| 309 | Marker | 1155 | tubulin folding cofactor B | TBCB |
| 310 | Marker | 27445 | piccolo (presynaptic cytomatrix protein) | PCLO |
| 311 | Marker | 60673 | chromosome 12 open reading frame 44 | C12orf44 |
| 312 | Marker | 6612 | SMT3 suppressor of mif two 3 homolog 3 (S. cerevisiae) | SUMO3 |
| 313 | Marker | 10969 | EBNA1 binding protein 2 | EBNA1BP2 |
| 314 | Marker | 51093 | chromosome 1 open reading frame 66 | C1orf66 |
| 315 | Marker | 7448 | vitronectin | VTN |
| 316 | Marker | 6830 | suppressor of Ty 6 homolog (S. cerevisiae) | SUPT6H |
| 317 | Marker | 51367 | processing of precursor 5, ribonuclease P/MRP subunit (S. cerevisiae) | POP5 |
| 318 | Marker | 10483 | Sec23 homolog B (S. cerevisiae) | SEC23B |
| 319 | Marker | 11332 | acyl-CoA thioesterase 7 | ACOT7 |
| 320 | Marker | 6949 | Treacher Collins-Franceschetti syndrome 1 | TCOF1 |
| 321 | Marker | 9131 | apoptosis-inducing factor, mitochondrion-associated, 1 | AIFM1 |
| 322 | Marker | 2040 | stomatin | STOM |
| 323 | Marker | 8636 | Sjogren syndrome nuclear autoantigen 1 | SSNA1 |
| 324 | Marker | 5223 | phosphoglycerate mutase 1 (brain) | PGAM1 |
| 325 | Marker | 2197 | Finkel-Biskis-Reilly murine sarcoma virus (FBR-MuSV) ubiquitously expressed | FAU |
| 326 | Marker | 4591 | tripartite motif-containing 37 | TRIM37 |
| 327 | Marker | 6903 | tubulin folding cofactor C | TBCC |
| 328 | Marker | 26135 | SERPINE1 mRNA binding protein 1 | SERBP1 |
| 329 | Marker | 3728 | junction plakoglobin | JUP |
| 330 | Marker | 283991 | family with sequence similarity 100, member B | FAM100B |
| 331 | Marker | 124930 | ankyrin repeat domain 13B | ANKRD13B |
| 332 | Marker | 5514 | Homo sapiens protein phosphatase 1, regulatory subunit 10 (PPP1R10), | PPP1R10 |
| | | | transript variant 1, mRNA | |
| 333 | Marker | 25796 | Homo sapiens 6-phosphogluconolactonase (PGLS), mRNA | PGLS |
| 334 | Marker | 83933 | histone deacetylase 10 | HDAC10 |
| 335 | Marker | 84324 | SAP domain containing ribonucleoprotein | SARNP |
| 336 | Marker | 1051 | CCAAT/enhancer binding protein (C/EBP), beta | CEBPB |
| 337 | Marker | 8320 | eomesodermin homolog (Xenopus laevis) | EOMES |
| 338 | Marker | 1844 | dual specificity phosphatase 2 | DUSP2 |
| 339 | Marker | 7276 | transthyretin | TTR |
| 340 | Marker | 55170 | protein arginine methyltransferase 6 | PRMT6 |
| 341 | Marker | 57646 | ubiquitin specific peptidase 28 | USP28 |
| 342 | Marker | 6451 | SH3 domain binding glutamic acid-rich protein like | SH3BGRL |
| 343 | Marker | 146713 | hezaribonucleotide binding protein 3 | hCG_1776007 |
| 344 | Marker | 10421 | CD2 (cytoplasmic tail) binding protein 2 | CD2BP2 |
| 345 | Marker | 1949 | ephrin-B3 | EFNB3 |
| 346 | Marker | 2631 | glioblastoma amplified sequence | GBAS |
| 347 | Marker | 9440 | mediator complex subunit 17 | MED17 |
| 348 | Marker | 81875 | interferon stimulated exonuclease gene 20 kDa-like 2 | ISG20L2 |
| 349 | Marker | 140739 | ubiquitin-conjugating enzyme E2F (putative) | UBE2F |
| 350 | Marker | 329 | baculoviral IAP repeat-containing 2 | BIRC2 |
| 351 | Marker | 85012 | transcription elongation factor A (SII)-like 3 | TCEAL3 |
| 352 | Marker | 51329 | ADP-ribosylation-like factor 6 interacting protein 4 | ARL6IP4 |
| 353 | Marker | 5174 | PDZ domain containing 1 | PDZK1 |
| 354 | Marker | 79637 | armadillo repeat containing 7 | ARMC7 |
| 355 | Marker | 85407 | naked cuticle homolog 1 (Drosophila) | NKD1 |
| 356 | Marker | 54518 | amyloid beta (A4) precursor protein-binding, family B, member 1 | APBB1IP |
| | | | interacting protein | |
| 357 | Marker | 177 | advanced glycosylation end product-specific receptor | AGER |
| 358 | Marker | 7561 | zinc finger protein 14 | ANF14 |
| 359 | Marker | 124359 | chromodomain protein, Y-like 2 | CDYL2 |

TABLE 2
Markers for NMO identified by statistical analysis of MFI data from NMO vs. Healthy.
The sequence of the markers can be obtained from the enclosed sequence listening.

| SEQ | Marker | | | |
|---|---|---|---|---|
| ID No. | Classification | GeneID | Gene name | Gene Symbol |
| 45 | TOP Marker | 25841 | ankyrin repeat and BTB (POZ) domain containing 2 | ABTB2 |
| 46 | TOP Marker | 627 | brain-derived neurotrophic factor | BDNF |
| 47 | TOP Marker | 58506 | SR-related CTD-associated factor 1 | SCAF1 |
| 48 | TOP Marker | 5982 | replication factor C (activator 1) 2, 40 kDa | RFC2 |
| 49 | TOP Marker | 3915 | laminin, gamma 1 (formerly LAMB2) | LAMC1 |
| 50 | TOP Marker | 324 | adenomatous polyposis coli | APC |
| 51 | TOP Marker | 5819 | poliovirus receptor-related 2 (herpesvirus entry mediator B) | PVRL2 |
| 52 | TOP Marker | 57455 | REX1, RNA exonuclease 1 homolog (S. cerevisiae) | REXO1 |
| 53 | TOP Marker | 10436 | EMG1 nucleolar protein homolog (S. cerevisiae) | EMG1 |
| 54 | TOP Marker | 55827 | DDB1 and CUL4 associated factor 6 | DCAF6 |
| 55 | TOP Marker | 5831 | pyrroline-5-carboxylate reductase 1 | PYCR1 |
| 56 | TOP Marker | 10445 | microspherule protein 1 | MCRS1 |
| 57 | TOP Marker | 128866 | chromatin modifying protein 4B | CHMP4B |
| 58 | TOP Marker | 3320 | heat shock protein 90 kDa alpha (cytosolic), class A member 1 | HSP90AA1 |
| 59 | TOP Marker | 23608 | makorin ring finger protein 1 | MKRN1 |
| 60 | TOP Marker | 5370 | pro-melanin-concentrating hormone-like 2, pseudogene | PMCHL2 |
| 61 | TOP Marker | 11054 | opioid growth factor receptor | OGFR |
| 62 | TOP Marker | — | OOF5370 | — |
| 63 | TOP Marker | — | OOF11054 | — |
| 64 | Marker | 57136 | chromosome 20 open reading frame 3 | C20orf3 |
| 65 | Marker | 10075 | HECT, UBA and WWE domain containing 1 | HUWE1 |
| 66 | Marker | — | Homo sapiens cDNA clone IMAGE: 30377818 5′mRNA sequence | — |
| 67 | Marker | 4744 | neurofilament, heavy polypeptide | NEFH |
| 68 | Marker | 7204 | triple functional domain (PTPRF interacting) | TRIO |
| 69 | Marker | 2935 | G1 to S phase transition 1 | GSPT1 |
| 70 | Marker | 64129 | tubulointerstitial nephritis antigen-like 1 | TINAGL1 |
| 71 | Marker | 10539 | glutaredoxin 3 | GLRX3 |
| 72 | Marker | 5595 | mitogen-activated protein kinase 3 | MAPK3 |
| 73 | Marker | 80728 | Rho GTPase activating protein 39 | ARHGAP39 |
| 74 | Marker | 1270 | ciliary neurotrophic factor | CNTF |
| 75 | Marker | 4354 | membrane protein, palmitoylated 1, 55 kDa | MPP1 |
| 76 | Marker | 23114 | neurofascin | NFASC |
| 77 | Marker | 8874 | Rho guanine nucleotide exchange factor (GEF) 7 | ARHGEF7 |
| 78 | Marker | 65109 | UPF3 regulator of nonsense transcripts homolog B (yeast) | UPF3B |
| 79 | Marker | 7316 | ubiquitin C | UBC |
| 80 | Marker | 5864 | RAB3A, member RAS oncogene family | RAB3A |
| 81 | Marker | 79582 | sperm associated antigen 16 | SPAG16 |
| 82 | Marker | 2037 | erythrocyte membrane protein band 4.1-like 2 | EPB41L2 |
| 83 | Marker | 283248 | Homo sapiens REST corepressor 2 (RCOR2), mRNA | RCOR2 |
| 84 | Marker | — | OOF5864 | — |
| 85 | Marker | — | OOF79582 | — |
| 86 | Marker | — | OOF2037 | — |
| 87 | Marker | — | OOF283248 | — |
| 360 | Top Marker | 10576 | chaperonin containing TCP1, subunit 2 (beta) | CCT2 |
| 361 | Top Marker | 794 | calbindin 2 | CALB2 |
| 362 | Top Marker | 90592 | zinc finger protein 700 | ZNF700 |
| 363 | Top Marker | 90075 | zinc finger protein 30 | ZNF30 |
| 364 | Top Marker | 55552 | zinc finger protein 823 | ZNF823 |
| 365 | Top Marker | 80184 | centrosomal protein 290 kDa | CEP290 |
| 366 | Top Marker | 311 | annexin A11 | ANXA11 |
| 367 | Top Marker | 421 | armadillo repeat gene deletes in velocardiofacial synderom | ARVCF |
| 368 | Top Marker | 9124 | PDZ and LIM domain 1 | PDLIM1 |
| 369 | Top Marker | 23468 | chromobox homolog 5 (HP1 alpha homolog, Drosophila) | CBX5 |
| 370 | Top Marker | 4173 | minichromosome maintenance complex component 4 | MCM4 |
| 371 | Top Marker | 6711 | spectrin, beta, non-erythrocytic 1 | SPTBN1 |
| 372 | Top Marker | 89953 | kinesin light chain 4 | KLC4 |
| 373 | Top Marker | 8608 | retinol dehydrogenase 16 (all-trans) | RDH16 |
| 374 | Top Marker | 3632 | inositol polyphosphate-5-phospatase, 40 kDa | INPP5A |
| 375 | Top Marker | 11326 | V-set and immunoglobulin domain containing 4 | VSIG4 |
| 376 | Marker | 55082 | arginine and glutamate rich 1 | ARGLU1 |
| 377 | Marker | 4796 | nuclear factor of kappa light polypetide gene enhancer in B-cells | NFKBIL2 |
| | | | inhibitor-like 2 | |
| 378 | Marker | 23521 | ribosomal protein L13a | RPL13A |
| 379 | Marker | 563 | alpha-2-glycoprotein 1, zinc-binding | AZGP1 |
| 380 | Marker | 11170 | family with sequence similarity 107, member A | FAM107A |
| 381 | Marker | 84622 | zinc finger protein 594 | ZNF594 |
| 382 | Marker | 11168 | PC4 and SFRS1 interacting protein 1 | PSIP1 |
| 383 | Marker | 203068 | tubulin, beta | TUBB |
| 384 | Marker | 57224 | Homo sapiens NHS-like 1 (NHSL1), transcript variant 1, mRNA | NHSL1 |
| 385 | Marker | 64841 | glucosamine-phosphate N-acetyltransferase 1 | GNPNAT1 |
| 386 | Marker | 6138 | ribosomal protein L15 | RPL15 |
| 387 | Marker | 9315 | chromosome 5 open reading frame 13 | C5orf13 |
| 388 | Marker | 84311 | mitochondrial ribosomal protein L45 | MRPL45 |
| 389 | Marker | 3507 | immunoglobulin heavy constant mu | IGHM |
| 390 | Marker | 28396 | immunoglobulin heavy variable 4-31 | IGHV4-31 |
| 391 | Marker | 126206 | NLR family, pyrin domain containing 5 | NLRP5 |
| 392 | Marker | 10524 | K(lysine) acetyltransferase 5 | KAT5 |
| 393 | Marker | 326625 | methylmalonic aciduria (cobalamin deficiency) cblB type | MMAB |
| 394 | Marker | 23636 | nucleoporin 62 kDa | NUP62 |
| 395 | Marker | 83706 | fermitin family homolog 3 (Drosophila) | FERMT3 |
| 396 | Marker | 7390 | uroporphyrinogen III synthase | UROS |
| 397 | Marker | 55068 | ecto-NOX disulfide-thiol exchanger 1 | ENOX1 |
| 398 | Marker | 140459 | ankyrin repeat and SOCS box-containing 6 | ASB6 |
| 399 | Marker | 2592 | galactose-1-phosphate uridylyltransferase | GALT |
| 400 | Marker | 221421 | radial spoke head 9 homolog (Chlamydomonas) | RSPH9 |
| 401 | Marker | 5725 | polypyrimidine tract binding protein 1 | PEBP1 |
| 402 | Marker | 84062 | dystrobrevin binding protein 1 | DTNMP1 |
| 403 | Marker | 27101 | calcyclin binding protein | CACYBP |
| 404 | Marker | 10970 | cytoskeleton-associated protein 4 | CKAP4 |
| 405 | Marker | 9326 | zinc finger, HIT type 3 | ZNHIT3 |
| 406 | Marker | 8943 | adaptor-related protein complex 3, delta 1 subunit | AP3D1 |
| 407 | Marker | 2161 | coagulation factor XII (Hageman factor) | F12 |
| 408 | Marker | 50626 | cystein/histidine-rich 1 | CYHR1 |
| 409 | Marker | 22913 | RNA binding protein, autoantigenic (hnRNP-associated with lethal | RALY |
| | | | yellow homolog (mouse)) | |
| 410 | Marker | 23061 | TBC1 domain family, member 9B (with GRAM domain) | TBC1D9B |
| 411 | Marker | 6494 | signal-induced proliferation-associated 1 | SIPA1 |
| 412 | Marker | 56975 | family with sequence similarity 20, member C | FAM20C |
| 413 | Marker | 6667 | Sp1 transcription factor | SP1 |
| 414 | Marker | 6461 | Src homology 2 domain containing adaptor protein B | SHB |
| 415 | Marker | 118 | adducin 1 (alpha) | ADD1 |
| 416 | Marker | 10078 | tumor suppressing subtransferable candidate 4 | TSSC4 |
| 417 | Marker | 4287 | ataxin 3 | ATXN3 |
| 418 | Marker | 1460 | casein kinase 2, beta polypeptide | CSNK2B |
| 419 | Marker | 5428 | polymerase (DNA directed), gamma | POLG |
| 420 | Marker | 9219 | metastasis associated 1 family, member 2 | MTA2 |
| 421 | Marker | 64689 | golgi reassembly stacking protein 1, 65 kDa | GORASP1 |
| 422 | Marker | 57677 | zinc finger protein 14 homolog (mouse) | ZFP14 |
| 423 | Marker | 283899 | INO80 complex subuit E | INO80E |
| 424 | Marker | 8565 | tyrosyl-tRNA synthetase | YARS |
| 425 | Marker | 65993 | mitochondrial ribosomal protein S34 | MRPS34 |
| 426 | Marker | 5937 | RNA binding motif, single stranded interacting protein 1 | RBMS1 |
| 427 | Marker | 29094 | galectin-related protein | HSPC159 |
| 428 | Marker | 3642 | insulinoma-associated 1 | INSM1 |
| 429 | Marker | 7568 | zinc finger protein 20 | ZNF20 |
| 430 | Marker | 65003 | mitochondrial ribosomal protein L11 | MRPL11 |
| 431 | Marker | 3503 | immunoglobulin heavy constant gamma 4 (G4m marker) | IGHG4 |
| 432 | Marker | 833 | Homo sapiens cysteinyl-tRNA synthetase (CARS), transcript | CARS |
| | | | variant 2, mRNA | |
| 433 | Marker | 4638 | myosin light chain kinase | MYLK |
| 434 | Marker | 10845 | ClpX caseinolytic peptidase X homolog (E. coli) | CLPX |
| 435 | Marker | 5611 | DnaJ (Hsp40) homolog, subfamily C, member 3 | DNAJC3 |
| 436 | Marker | 5917 | arginyl-tRNA synthetase | RARS |
| 437 | Marker | 147837 | zinc finger protein 563 | ZNF563 |
| 438 | Marker | 5535 | protein phosphatase 2, regulatory subunit B′, alpha isoform | PPP2R5A |
| 439 | Marker | 1562 | cytochrome P450, family 2, subfamily C, polypetide 18 | CYP2C18 |
| 440 | Marker | 23122 | cytoplasmic linker associated protein 2 | CLASP2 |
| 441 | Marker | 22982 | DIP2 disco-interacting protein 2 homolog C (Drosophila) | DIP2C |
| 442 | Marker | 11117 | elastin microfibril interfacer 1 | EMILIN1 |
| 443 | Marker | 283373 | ankyrin repeat domain 52 | ANKRD52 |
| 444 | Marker | 90102 | pleckstrin homology-like domain, family B, member 2 | PHLDB2 |
| 445 | Marker | 84527 | zinc finger protein 559 | ZNF559 |
| 446 | Marker | 338440 | anoctamin 9 | ANO9 |
| 447 | Marker | 9459 | Rac/Cdc42 guanine nucleotide exchange factor (GEF) 6 | ARHGEF6 |
| 448 | Marker | 864 | runt-related transcription factor 3 | RUNX3 |
| 449 | Marker | 53827 | FXYD domain containing ion transport regulator 5 | FXYD5 |
| 450 | Marker | 165215 | family with sequence similarity 171, member B | FAM171B |
| 451 | Marker | 2810 | stratifin | SFN |
| 452 | Marker | 135398 | chromosome 6 open reading frame 141 | C6orf141 |
| 453 | Marker | 64981 | mitochondrial ribosomal protein L34 | MRPL34 |
| 454 | Marker | 3183 | heterogeneous nuclear ribonucleoprotein C (C1/C2) | HNRNPC |
| 455 | Marker | 6125 | Homo sapiens ribosomal protein L5 (RPL5), mRNA | RPL5 |
| 456 | Marker | 2919 | Homo sapiens chemokine (C-X-C motif) ligand 1 (melanoma growth | CXCL1 |
| | | | stimulating activity, alpha) (CXCL1), transcript variant 1, mRNA | |
| 457 | Marker | 6634 | Homo sapiens small nuclear ribonucleoprotein D3 polypeptide 18 kDa | SNRPD3 |
| | | | (SNRPD3), transcript variant 1, mRNA | |
| 458 | Top Marker | 85012 | transcription elongation factor A (SII)-like 3 | TCEAL3 |
| 459 | Marker | 2159 | coagulation factor X | F10 |
| 460 | Marker | 7561 | zinc finger protein 14 | ZNF14 |
| 461 | Marker | 7448 | vitronectin | VTN |
| 462 | Marker | 26135 | SERPINE1 mRNA binding protein 1 | SERBP1 |
| 463 | Marker | 3728 | junction plakoglobin | JUP |
| 464 | Marker | 177 | advanced glycosylation end product-specific receptor | AGER |

### Univariate Analysis:

TABLE 3.1
NMO vs. healthy controls
Scoring and identification of univariate TOP 30 candidates based on score and p-value ranking.

| | | | | | p- | Fold | effect | Fisher's | | | |
|---|---|---|---|---|---|---|---|---|---|---|---|
| | Score | ProteinID | GeneID | Gene Name | value | change | size | ratio | Median 1 | Median 2 | AUC |
| 1 | 6.5 | BBA00.260_1043136934 | 361 | aquaporin 4 | 0.0020 | 7.46 | 1.81 | 1.49 | 303 | 2263 | 0.875 |
| 2 | 6.5 | BBA00.347_1043135290 | 11054 | opioid growth factor receptor | 0.0039 | 7.48 | 1.40 | 0.90 | 546 | 4085 | 0.851 |
| 3 | 6.5 | BBA00.288_1043143161 | 10436 | EMG1 nucleolar protein | 0.0130 | 2.22 | 1.30 | 0.77 | 515 | 1144 | 0.802 |
| | | | | homolog (S. cerevisiae) | | | | | | | |
| 4 | 6.5 | BBA00.315_1043143926 | 10445 | microspherule protein 1 | 0.0166 | −4.02 | 1.14 | 0.60 | 4368 | 1088 | 0.792 |
| 5 | 6.5 | BBA00.392_1043140856 | 23608 | makorin ring finger protein 1 | 0.0226 | 2.63 | 1.13 | 0.58 | 1191 | 3134 | 0.778 |
| 6 | 6.5 | BBA00.119_1043136825 | 324 | adenomatous polyposis coli | 0.0281 | 3.09 | 1.09 | 0.54 | 1116 | 3453 | 0.767 |
| 7 | 6.5 | BBA00.205_1043143644 | 57455 | REX1, RNA exonuclease 1 | 0.0304 | 3.21 | 1.07 | 0.52 | 332 | 1065 | 0.764 |
| | | | | homolog (S. cerevisiae) | | | | | | | |
| 8 | 6 | BBA00.365_1043144408 | 3320 | heat shock protein 90 kDa | 0.0011 | 2.13 | 1.57 | 1.13 | 237 | 506 | 0.896 |
| | | | | alpha (cytosolic), class A | | | | | | | |
| | | | | member 1 | | | | | | | |
| 9 | 6 | BBA00.298_1043143832 | 55827 | DDB1 and CUL4 associated | 0.0225 | 3.69 | 1.04 | 0.49 | 147 | 544 | 0.778 |
| | | | | factor 6 | | | | | | | |
| 10 | 6 | BBA00.044_1043136937 | 25841 | ankyrin repeat and BTB | 0.0351 | −2.41 | 1.05 | 0.50 | 510 | 211 | 0.757 |
| | | | | (POZ) domain containing 2 | | | | | | | |
| 11 | 5.5 | BBA00.272_1043143163 | No Gene | NA | 0.0783 | −2.09 | 0.56 | 0.15 | 1452 | 694 | 0.715 |
| | | | ID | | | | | | | | |
| 12 | 5.5 | BBA00.198_1043136831 | 2935 | G1 to S phase transition 1 | 0.0831 | 2.78 | 0.75 | 0.26 | 2659 | 7402 | 0.712 |
| 13 | 5.5 | BBA00.231_1043135293 | 10539 | glutaredoxin 3 | 0.1409 | −3.98 | 0.59 | 0.16 | 5562 | 1398 | 0.681 |
| 14 | 5 | BBA00.075_1043137831 | 5370 | P389ro-melanin-concentrating | 0.0035 | −2.04 | 1.27 | 0.74 | 149 | 73 | 0.854 |
| | | | | hormone-like 2, pseudogene | | | | | | | |
| 15 | 5 | BBA00.311_1043143356 | 5831 | pyrroline-5-carboxylate | 0.0079 | 2.67 | 0.84 | 0.32 | 129 | 343 | 0.823 |
| | | | | reductase 1 | | | | | | | |
| 16 | 5 | BBA00.210_1043140481 | 64129 | tubulointerstitial nephritis | 0.0120 | −1.81 | 1.05 | 0.50 | 652 | 360 | 0.806 |
| | | | | antigen-like 1 | | | | | | | |
| 17 | 5 | BBA00.351_1043144220 | 128866 | chromatin modifying protein | 0.0120 | 2.23 | 0.79 | 0.28 | 159 | 354 | 0.806 |
| | | | | 4B | | | | | | | |
| 18 | 5 | BBA00.068_1043138278 | 5982 | replication factor C (activator | 0.0130 | −2.55 | 1.04 | 0.50 | 297 | 117 | 0.802 |
| | | | | 1) 2, 40 kDa | | | | | | | |
| 19 | 5 | BBA00.047_1043136648 | 627 | brain-derived neurotrophic | 0.0194 | −2.08 | 1.19 | 0.65 | 136 | 65 | 0.785 |
| | | | | factor | | | | | | | |
| 20 | 5 | BBA00.150_1043141334 | 7204 | triple functional domain | 0.0304 | −1.99 | 0.55 | 0.14 | 700 | 352 | 0.764 |
| | | | | (PTPRF interacting) | | | | | | | |
| 21 | 5 | BBA00.251_1043141343 | 80728 | Rho GTPase activating | 0.0304 | −1.70 | 1.03 | 0.49 | 785 | 461 | 0.764 |
| | | | | protein 39 | | | | | | | |
| 22 | 5 | BBA00.109_1043137791 | 3915 | laminin, gamma 1 (formerly | 0.0404 | 2.42 | 0.99 | 0.45 | 355 | 858 | 0.750 |
| | | | | LAMB2) | | | | | | | |
| 23 | 5 | BBA00.140_1043143542 | 5819 | poliovirus receptor-related 2 | 0.0404 | 3.84 | 0.96 | 0.42 | 183 | 701 | 0.750 |
| | | | | (herpesvirus entry mediator B) | | | | | | | |
| 24 | 5 | BBA00.059_1043138765 | 58506 | SR-related CTD-associated | 0.0464 | −3.13 | 0.96 | 0.42 | 774 | 248 | 0.743 |
| | | | | factor 1 | | | | | | | |
| 25 | 5 | BBA00.237_1043135291 | 5595 | mitogen-activated protein | 0.0781 | −2.02 | 0.85 | 0.33 | 653 | 322 | 0.715 |
| | | | | kinase 3 | | | | | | | |
| 26 | 5 | BBA00.080_1043143745 | No Gene | NA | 0.1058 | 3.58 | 0.61 | 0.17 | 145 | 520 | 0.698 |
| | | | ID | | | | | | | | |
| 27 | 5 | BBA00.284_1043136634 | 1270 | ciliary neurotrophic factor | 0.1124 | −2.06 | 0.51 | 0.12 | 887 | 430 | 0.694 |
| 28 | 4.5 | BBA00.320_1043140474 | 8874 | Rho guanine nucleotide | 0.0646 | 1.46 | 0.59 | 0.16 | 758 | 1110 | 0.726 |
| | | | | exchange factor (GEF) 7 | | | | | | | |
| 29 | 4.5 | BBA00.036_1043143937 | 5864 | RAB3A, member RAS | 0.0831 | −1.78 | 0.99 | 0.45 | 1268 | 713 | 0.712 |
| | | | | oncogene family | | | | | | | |
| 30 | 4.5 | BBA00.340_1043138937 | 65109 | UPF3 regulator of nonsense | 0.0997 | 1.90 | 0.96 | 0.43 | 1200 | 2286 | 0.701 |
| | | | | transcripts homolog B (yeast) | | | | | | | |

TABLE 3.2
NMO vs. MS
Scoring and identification of univariate TOP 30 candidates based on score and p-value ranking.

| | | | | | p- | Fold | effect | Fisher's | Median | Median | |
|---|---|---|---|---|---|---|---|---|---|---|---|
| | Score | ProteinID | GeneID | Gene Name | value | change | size | ratio | 1 | 2 | AUC |
| 1 | 6.5 | BBA00.260_1043136934 | 361 | aquaporin 4 | 0.0007 | 8.91 | 1.71 | 1.37 | 254 | 2263 | 0.875 |
| 2 | 6.5 | BBA00.288_1043143161 | 10436 | EMG1 nucleolar protein | 0.0072 | 2.37 | 0.60 | 0.19 | 482 | 1144 | 0.796 |
| | | | | homolog (S. cerevisiae) | | | | | | | |
| 3 | 6.5 | BBA00.340_1043138937 | 65109 | UPF3 regulator of nonsense | 0.0209 | 2.20 | 0.55 | 0.16 | 1038 | 2286 | 0.755 |
| | | | | transcripts homolog B (yeast) | | | | | | | |
| 4 | 6 | BBA00.210_1043140481 | 64129 | tubulointerstitial nephritis | 0.0033 | −2.08 | 1.27 | 0.78 | 748 | 360 | 0.824 |
| | | | | antigen-like 1 | | | | | | | |
| 5 | 6 | BBA00.035_1043138758 | 4775 | nuclear factor of activated T- | 0.0158 | 2.77 | 1.00 | 0.44 | 314 | 870 | 0.766 |
| | | | | cells, cytoplasmic, | | | | | | | |
| | | | | calcineurin-dependent 3 | | | | | | | |
| 6 | 5.5 | BBA00.324_1043137810 | 27344 | proprotein convertase | 0.0246 | −7.44 | 1.03 | 0.49 | 16628 | 2235 | 0.748 |
| | | | | subtilisin/kexin type 1 | | | | | | | |
| | | | | inhibitor | | | | | | | |
| 7 | 5.5 | BBA00.376_1043143543 | 6838 | surfeit 6 | 0.0308 | −2.39 | 0.76 | 0.27 | 1258 | 526 | 0.738 |
| 8 | 5.5 | BBA00.295_1043138939 | 1938 | eukaryotic translation | 0.0380 | 3.92 | 0.94 | 0.40 | 320 | 1253 | 0.729 |
| | | | | elongation factor 2 | | | | | | | |
| 9 | 5.5 | BBA00.343_1043143350 | 6152 | ribosomal protein L24 | 0.0443 | −2.14 | 0.91 | 0.41 | 1007 | 471 | 0.722 |
| 10 | 5.5 | BBA00.392_1043140856 | 23608 | makorin ring finger protein 1 | 0.0443 | 2.71 | 0.85 | 0.33 | 1156 | 3134 | 0.722 |
| 11 | 5.5 | BBA00.328_1043140473 | 6434 | transformer 2 beta homolog | 0.0466 | −3.14 | 0.71 | 0.23 | 1773 | 565 | 0.720 |
| | | | | (Drosophila) | | | | | | | |
| 12 | 5.5 | BBA00.354_1043142586 | 7431 | vimentin | 0.0655 | 3.50 | 0.80 | 0.28 | 319 | 1117 | 0.704 |
| 13 | 5.5 | BBA00.333_1043144502 | 375690 | WAS protein family | 0.0789 | 2.05 | 0.69 | 0.23 | 1851 | 3801 | 0.694 |
| | | | | homolog 5 pseudogene | | | | | | | |
| 14 | 5.5 | BBA00.213_1043140091 | 6461 | Src homology 2 domain | 0.1892 | 2.12 | 0.43 | 0.09 | 1220 | 2591 | 0.646 |
| | | | | containing adaptor protein B | | | | | | | |
| 15 | 5.5 | BBA00.205_1043143644 | 57455 | REX1, RNA exonuclease 1 | 0.2040 | 2.21 | 0.55 | 0.13 | 482 | 1065 | 0.641 |
| | | | | homolog (S. cerevisiae) | | | | | | | |
| 16 | 5.5 | BBA00.119_1043136825 | 324 | adenomatous polyposis coli | 0.2116 | 3.17 | 0.64 | 0.18 | 1089 | 3453 | 0.639 |
| 17 | 5 | BBA00.302_1043135287 | 6130 | ribosomal protein L7a | 0.0017 | −1.70 | 1.09 | 0.64 | 605 | 355 | 0.845 |
| 18 | 5 | BBA00.252_1043144317 | 339230 | coiled-coil domain containing | 0.0025 | −1.53 | 1.02 | 0.54 | 764 | 501 | 0.833 |
| | | | | 137 | | | | | | | |
| 19 | 5 | BBA00.027_1043138757 | 4155 | myelin basic protein | 0.0052 | 2.27 | 0.95 | 0.41 | 197 | 449 | 0.808 |
| 20 | 5 | BBA00.317_1043144508 | 4122 | mannosidase, alpha, class 2A, | 0.0092 | −1.97 | 0.96 | 0.46 | 844 | 428 | 0.787 |
| | | | | member 2 | | | | | | | |
| 21 | 5 | BBA00.068_1043138278 | 5982 | replication factor C | 0.0092 | −3.42 | 1.13 | 0.62 | 398 | 117 | 0.787 |
| | | | | (activator 1) 2, 40 kDa | | | | | | | |
| 22 | 5 | BBA00.263_1043138267 | 23646 | phospholipase D family, | 0.0098 | −1.57 | 1.25 | 0.78 | 693 | 441 | 0.785 |
| | | | | member 3 | | | | | | | |
| 23 | 5 | BBA00.242_0105509577 | 79155 | TNFAIP3 interacting | 0.0199 | −1.80 | 1.01 | 0.52 | 891 | 496 | 0.757 |
| | | | | protein 2 | | | | | | | |
| 24 | 5 | BBA00.193_1043143261 | 10569 | SLU7 splicing factor homolog | 0.0210 | −1.76 | 0.67 | 0.23 | 737 | 418 | 0.755 |
| | | | | (S. cerevisiae) | | | | | | | |
| 25 | 5 | BBA00.080_1043143745 | No | NA | 0.0262 | 3.80 | 0.99 | 0.44 | 137 | 520 | 0.745 |
| | | | Gene ID | | | | | | | | |
| 26 | 5 | BBA00.059_1043138765 | 58506 | SR-related CTD-associated | 0.0541 | −2.19 | 0.83 | 0.32 | 542 | 248 | 0.713 |
| | | | | factor 1 | | | | | | | |
| 27 | 5 | BBA00.189_1043143648 | 84893 | F-box protein, helicase, 18 | 0.0541 | 3.45 | 0.82 | 0.30 | 218 | 752 | 0.713 |
| 28 | 5 | BBA00.169_1043144025 | 90861 | hematological and | 0.0987 | 2.32 | 0.66 | 0.19 | 241 | 559 | 0.683 |
| | | | | neurological expressed | | | | | | | |
| | | | | 1-like | | | | | | | |
| 29 | 4.5 | BBA00.400_1043140097 | 10081 | programmed cell death 7 | 0.0325 | −1.99 | 0.89 | 0.36 | 1485 | 745 | 0.736 |
| 30 | 4.5 | BBA00.280_1043143162 | 11019 | lipoic acid synthetase | 0.0325 | 1.56 | 1.00 | 0.41 | 754 | 1179 | 0.736 |

TABLE 3.3
NMO vs. healthy controls
“Edge candidates” resulting from Volcano plot, fold-change at least 2 in either direction and p-value <0.05.

| | | | | | adjusted | test | fold- | | effect | log2 | −log10 |
|---|---|---|---|---|---|---|---|---|---|---|---|
| | ProteinID | GeneID | Gene Name | p-value | p-value | statistic | change | FDR | size | (ratio) | (p-value) |
| 1 | BBA00.365_1043144408 | 3320 | heat shock protein 90 kDa | 0.0011 | 0.2708 | 15 | 2.13 | 0.14 | 1.57 | 1.09 | 2.96 |
| | | | alpha (cytosolic), class A | | | | | | | | |
| | | | member 1 | | | | | | | | |
| 2 | BBA00.047_1043136648 | 627 | brain-derived neurotrophic | 0.0194 | 1.0000 | 113 | −2.08 | 0.32 | 1.19 | −1.06 | 1.71 |
| | | | factor | | | | | | | | |
| 3 | BBA00.298_1043143832 | 55827 | DDB1 and CUL4 associated | 0.0225 | 1.0000 | 32 | 3.69 | 0.32 | 1.04 | 1.89 | 1.65 |
| | | | factor 6 | | | | | | | | |
| 4 | BBA00.392_1043140856 | 23608 | makorin ring finger protein 1 | 0.0226 | 1.0000 | 32 | 2.63 | 0.32 | 1.13 | 1.40 | 1.65 |
| 5 | BBA00.119_1043136825 | 324 | adenomatous polyposis coli | 0.0281 | 1.0000 | 33.5 | 3.09 | 0.32 | 1.09 | 1.63 | 1.55 |
| 6 | BBA00.205_1043143644 | 57455 | REX1, RNA exonuclease 1 | 0.0304 | 1.0000 | 34 | 3.21 | 0.32 | 1.07 | 1.68 | 1.52 |
| | | | homolog (S. cerevisiae) | | | | | | | | |
| 7 | BBA00.044_1043136937 | 25841 | ankyrin repeat and BTB | 0.0351 | 1.0000 | 109 | −2.41 | 0.32 | 1.05 | −1.27 | 1.45 |
| | | | (POZ) domain containing 2 | | | | | | | | |
| 8 | BBA00.109_1043137791 | 3915 | laminin, gamma 1 (formerly | 0.0404 | 1.0000 | 36 | 2.42 | 0.32 | 0.99 | 1.27 | 1.39 |
| | | | LAMB2) | | | | | | | | |
| 9 | BBA00.140_1043143542 | 5819 | poliovirus receptor-related | 0.0404 | 1.0000 | 36 | 3.84 | 0.32 | 0.96 | 1.94 | 1.39 |
| | | | 2 (herpesvirus entry | | | | | | | | |
| | | | mediator B) | | | | | | | | |
| 10 | BBA00.059_1043138765 | 58506 | SR-related CTD-associated | 0.0464 | 1.0000 | 107 | −3.13 | 0.34 | 0.96 | −1.64 | 1.33 |
| | | | factor 1 | | | | | | | | |
| 11 | BBA00.260_1043136934 | 361 | aquaporin 4 | 0.0020 | 0.4923 | 18 | 7.46 | 0.17 | 1.81 | 2.90 | 2.70 |
| 12 | BBA00.075_1043137831 | 5370 | pro-melanin-concentrating | 0.0035 | 0.8626 | 123 | −2.04 | 0.19 | 1.27 | −1.03 | 2.45 |
| | | | hormone-like 2, pseudogene | | | | | | | | |
| 13 | BBA00.347_1043135290 | 11054 | opioid growth factor | 0.0039 | 0.9421 | 21.5 | 7.48 | 0.19 | 1.40 | 2.90 | 2.41 |
| | | | receptor | | | | | | | | |
| 14 | BBA00.311_1043143356 | 5831 | pyrroline-5-carboxylate | 0.0079 | 1.0000 | 25.5 | 2.67 | 0.27 | 0.84 | 1.42 | 2.10 |
| | | | reductase 1 | | | | | | | | |
| 15 | BBA00.351_1043144220 | 128866 | chromatin modifying protein 4B | 0.0120 | 1.0000 | 28 | 2.23 | 0.27 | 0.79 | 1.16 | 1.92 |
| 16 | BBA00.068_1043138278 | 5982 | replication factor C | 0.0130 | 1.0000 | 115.5 | −2.55 | 0.27 | 1.04 | −1.35 | 1.89 |
| | | | (activator 1) 2, 40 kDa | | | | | | | | |
| 17 | BBA00.288_1043143161 | 10436 | EMG1 nucleolar protein | 0.0130 | 1.0000 | 28.5 | 2.22 | 0.27 | 1.30 | 1.15 | 1.89 |
| | | | homolog (S. cerevisiae) | | | | | | | | |
| 18 | BBA00.315_1043143926 | 10445 | microspherule protein 1 | 0.0166 | 1.0000 | 114 | −4.02 | 0.29 | 1.14 | −2.01 | 1.78 |

TABLE 3.4
NMO vs. MS
“Edge candidates” resulting from Volcano plot, fold-change at least 2 in either direction and p-value <0.05.

| | | | | p- | adjusted | test | fold- | | effect | log2 | −log10 |
|---|---|---|---|---|---|---|---|---|---|---|---|
| | ProteinID | GeneID | Gene Name | value | p-value | statistic | change | FDR | size | (ratio) | (p-value) |
| 1 | BBA00.260_1043136934 | 361 | aquaporin 4 | 0.0007 | 0.1611 | 27.00 | 8.91 | 0.08 | 1.71 | 3.16 | 3.18 |
| 2 | BBA00.376_1043143543 | 6838 | surfeit 6 | 0.0308 | 1.0000 | 159.50 | −2.39 | 0.33 | 0.76 | −1.26 | 1.51 |
| 3 | BBA00.295_1043138939 | 1938 | eukaryotic translation | 0.0380 | 1.0000 | 58.50 | 3.92 | 0.33 | 0.94 | 1.97 | 1.42 |
| | | | elongation factor 2 | | | | | | | | |
| 4 | BBA00.343_1043143350 | 6152 | ribosomal protein L24 | 0.0443 | 1.0000 | 156.00 | −2.14 | 0.33 | 0.91 | −1.10 | 1.35 |
| 5 | BBA00.392_1043140856 | 23608 | makorin ring finger protein 1 | 0.0443 | 1.0000 | 60.00 | 2.71 | 0.33 | 0.85 | 1.44 | 1.35 |
| 6 | BBA00.328_1043140473 | 6434 | transformer 2 beta homolog | 0.0466 | 1.0000 | 155.50 | −3.14 | 0.34 | 0.71 | −1.65 | 1.33 |
| | | | (Drosophila) | | | | | | | | |
| 7 | BBA00.210_1043140481 | 64129 | tubulointerstitial nephritis | 0.0033 | 0.7838 | 178.00 | −2.08 | 0.11 | 1.27 | −1.05 | 2.49 |
| | | | antigen-like 1 | | | | | | | | |
| 8 | BBA00.027_1043138757 | 4155 | myelin basic protein | 0.0052 | 1.0000 | 41.50 | 2.27 | 0.16 | 0.95 | 1.18 | 2.28 |
| 9 | BBA00.288_1043143161 | 10436 | EMG1 nucleolar protein | 0.0072 | 1.0000 | 44.00 | 2.37 | 0.19 | 0.60 | 1.25 | 2.14 |
| | | | homolog (S. cerevisiae) | | | | | | | | |
| 10 | BBA00.068_1043138278 | 5982 | replication factor C (activator | 0.0092 | 1.0000 | 170.00 | −3.42 | 0.19 | 1.13 | −1.77 | 2.04 |
| | | | 1) 2, 40 kDa | | | | | | | | |
| 11 | BBA00.035_1043138758 | 4775 | nuclear factor of activated T- | 0.0158 | 1.0000 | 50.50 | 2.77 | 0.26 | 1.00 | 1.47 | 1.80 |
| | | | cells, cytoplasmic, | | | | | | | | |
| | | | calcineurin-dependent 3 | | | | | | | | |
| 12 | BBA00.340_1043138937 | 65109 | UPF3 regulator of nonsense | 0.0209 | 1.0000 | 53.00 | 2.20 | 0.27 | 0.55 | 1.14 | 1.68 |
| | | | transcripts homolog B (yeast) | | | | | | | | |
| 13 | BBA00.324_1043137810 | 27344 | proprotein convertase | 0.0246 | 1.0000 | 161.50 | −7.44 | 0.30 | 1.03 | −2.90 | 1.61 |
| | | | subtilisin/kexin type 1 | | | | | | | | |
| | | | inhibitor | | | | | | | | |
| 14 | BBA00.080_1043143745 | No | NA | 0.0262 | 1.0000 | 55.00 | 3.80 | 0.31 | 0.99 | 1.93 | 1.58 |
| | | Gene ID | | | | | | | | | |

### Multivariate Analysis:

TABLE 4.1
NMO vs. healthy controls
Antigens with freq >/=100 or (freq >/=80 and median rank </=16) obtained from a ranking
list and panel definition according to PPLS-DA TOP 30 (200 runs) based on all antigens.

| | ProteinID | GeneID | Gene.Name | freq | median rank |
|---|---|---|---|---|---|
| 16 | BBA00.260_1043136934 | 361 | aquaporin 4 | 200 | 1 |
| 25 | BBA00.347_1043135290 | 11054 | opioid growth factor receptor | 200 | 3 |
| 22 | BBA00.315_1043143926 | 10445 | microspherule protein 1 | 199 | 5 |
| 27 | BBA00.392_1043140856 | 23608 | makorin ring finger protein 1 | 192 | 6 |
| 14 | BBA00.205_1043143644 | 57455 | REX1, RNA exonuclease 1 homolog (S. cerevisiae) | 187 | 11 |
| 4 | BBA00.059_1043138765 | 58506 | SR-related CTD-associated factor 1 | 182 | 8 |
| 10 | BBA00.119_1043136825 | 324 | adenomatous polyposis coli | 179 | 14 |
| 19 | BBA00.298_1043143832 | 55827 | DDB1 and CUL4 associated factor 6 | 163 | 11 |
| 12 | BBA00.140_1043143542 | 5819 | poliovirus receptor-related 2 (herpesvirus entry mediator B) | 161 | 13 |
| 2 | BBA00.036_1043143937 | 5864 | RAB3A, member RAS oncogene family | 160 | 7 |
| 9 | BBA00.109_1043137791 | 3915 | laminin, gamma 1 (formerly LAMB2) | 155 | 13.5 |
| 7 | BBA00.068_1043138278 | 5982 | replication factor C (activator 1) 2, 40 kDa | 149 | 15 |
| 15 | BBA00.251_1043141343 | 80728 | Rho GTPase activating protein 39 | 142 | 18 |
| 26 | BBA00.365_1043144408 | 3320 | heat shock protein 90 kDa alpha (cytosolic), class A member 1 | 142 | 7 |
| 23 | BBA00.340_1043138937 | 65109 | UPF3 regulator of nonsense transcripts homolog B (yeast) | 132 | 17.5 |
| 6 | BBA00.066_1043142796 | 10075 | HECT, UBA and WWE domain containing 1 | 126 | 15 |
| 11 | BBA00.134_1043141344 | 4744 | neurofilament, heavy polypeptide | 125 | 15 |
| 5 | BBA00.065_1043140868 | 79582 | sperm associated antigen 16 | 123 | 19 |
| 8 | BBA00.075_1043137831 | 5370 | pro-melanin-concentrating hormone-like 2, pseudogene | 113 | 13 |
| 20 | BBA00.308_1043136631 | 23114 | neurofascin | 113 | 17 |
| 1 | BBA00.032_1043143271 | 57136 | chromosome 20 open reading frame 3 | 109 | 19 |
| 17 | BBA00.286_1043143930 | 4354 | membrane protein, palmitoylated 1, 55 kDa | 104 | 20 |
| 21 | BBA00.311_1043143356 | 5831 | pyrroline-5-carboxylate reductase 1 | 100 | 18 |
| 24 | BBA00.341_1043144416 | 7316 | ubiquitin C | 100 | 21 |
| 13 | BBA00.198_1043136831 | 2935 | G1 to S phase transition 1 | 99 | 16 |
| 3 | BBA00.047_1043136648 | 627 | brain-derived neurotrophic factor | 98 | 15 |
| 18 | BBA00.288_1043143161 | 10436 | EMG1 nucleolar protein homolog (S. cerevisiae) | 95 | 15 |

TABLE 4.2
NMO vs healthy controls
Ranking list of PPLS-DA results based on antigens with freq >/=100 or (freq >/=80 and
median rank </=16) obtained from a ranking list and panel definition according to PPLS-
DA TOP 30 (200 runs) based on all antigens.

| | ProteinID | GeneID | Gene.Name | abs.loading.weight.comp.1. |
|---|---|---|---|---|
| x.BBA00.260_1043136934 | BBA00.260_1043136934 | 361 | aquaporin 4 | 0.39 |
| x.BBA00.347_1043135290 | BBA00.347_1043135290 | 11054 | opioid growth factor receptor | 0.31 |
| x.BBA00.315_1043143926 | BBA00.315_1043143926 | 10445 | microspherule protein 1 | 0.24 |
| x.BBA00.392_1043140856 | BBA00.392_1043140856 | 23608 | makorin ring finger protein 1 | 0.23 |
| x.BBA00.365_1043144408 | BBA00.365_1043144408 | 3320 | heat shock protein 90 kDa alpha | 0.20 |
| | | | (cytosolic), class A member 1 | |
| x.BBA00.059_1043138765 | BBA00.059_1043138765 | 58506 | SR-related CTD-associated factor 1 | 0.20 |
| x.BBA00.036_1043143937 | BBA00.036_1043143937 | 5864 | RAB3A, member RAS oncogene family | 0.20 |
| x.BBA00.205_1043143644 | BBA00.205_1043143644 | 57455 | REX1, RNA exonuclease 1 homolog | 0.19 |
| | | | (S. cerevisiae) | |
| x.BBA00.119_1043136825 | BBA00.119_1043136825 | 324 | adenomatous polyposis coli | 0.19 |
| x.BBA00.298_1043143832 | BBA00.298_1043143832 | 55827 | DDB1 and CUL4 associated factor 6 | 0.18 |
| x.BBA00.140_1043143542 | BBA00.140_1043143542 | 5819 | poliovirus receptor-related 2 (herpesvirus | 0.17 |
| | | | entry mediator B) | |
| x.BBA00.109_1043137791 | BBA00.109_1043137791 | 3915 | laminin, gamma 1 (formerly LAMB2) | 0.17 |
| x.BBA00.068_1043138278 | BBA00.068_1043138278 | 5982 | replication factor C (activator 1) 2, 40 kDa | 0.17 |
| x.BBA00.075_1043137831 | BBA00.075_1043137831 | 5370 | pro-melanin-concentrating hormone-like 2, | 0.16 |
| | | | pseudogene | |
| x.BBA00.251_1043141343 | BBA00.251_1043141343 | 80728 | Rho GTPase activating protein 39 | 0.16 |
| x.BBA00.134_1043141344 | BBA00.134_1043141344 | 4744 | neurofilament, heavy polypeptide | 0.16 |
| x.BBA00.065_1043140868 | BBA00.065_1043140868 | 79582 | sperm associated antigen 16 | 0.16 |
| x.BBA00.288_1043143161 | BBA00.288_1043143161 | 10436 | EMG1 nucleolar protein homolog | 0.16 |
| | | | (S. cerevisiae) | |
| x.BBA00.066_1043142796 | BBA00.066_1043142796 | 10075 | HECT, UBA and WWE domain | 0.16 |
| | | | containing 1 | |
| x.BBA00.340_1043138937 | BBA00.340_1043138937 | 65109 | UPF3 regulator of nonsense transcripts | 0.16 |
| | | | homolog B (yeast) | |
| x.BBA00.032_1043143271 | BBA00.032_1043143271 | 57136 | chromosome 20 open reading frame 3 | 0.16 |
| x.BBA00.047_1043136648 | BBA00.047_1043136648 | 627 | brain-derived neurotrophic factor | 0.15 |
| x.BBA00.311_1043143356 | BBA00.311_1043143356 | 5831 | pyrroline-5-carboxylate reductase 1 | 0.14 |
| x.BBA00.308_1043136631 | BBA00.308_1043136631 | 23114 | neurofascin | 0.14 |
| x.BBA00.341_1043144416 | BBA00.341_1043144416 | 7316 | ubiquitin C | 0.14 |
| x.BBA00.198_1043136831 | BBA00.198_1043136831 | 2935 | G1 to S phase transition 1 | 0.13 |
| x.BBA00.286_1043143930 | BBA00.286_1043143930 | 4354 | membrane protein, palmitoylated 1, | 0.13 |
| | | | 55 kDa | |

TABLE 4.3
NMO vs. healthy controls
Antigens from ranking list and panel definition according to PPLS-DA TOP 30 (200 runs)
based on all antigens without AQP-4 and with freq >/=100 or (freq >/=80 and median
rank </=16).

| | ProteinID | GeneID | Gene.Name | freq | median rank |
|---|---|---|---|---|---|
| 25 | BBA00.347_1043135290 | 11054 | opioid growth factor receptor | 200 | 2 |
| 22 | BBA00.315_1043143926 | 10445 | microspherule protein 1 | 193 | 4 |
| 27 | BBA00.392_1043140856 | 23608 | makorin ring finger protein 1 | 191 | 5 |
| 16 | BBA00.205_1043143644 | 57455 | REX1, RNA exonuclease 1 homolog (S. cerevisiae) | 188 | 10 |
| 11 | BBA00.119_1043136825 | 324 | adenomatous polyposis coli | 178 | 12 |
| 5 | BBA00.059_1043138765 | 58506 | SR-related CTD-associated factor 1 | 175 | 8 |
| 19 | BBA00.298_1043143832 | 55827 | DDB1 and CUL4 associated factor 6 | 164 | 11 |
| 10 | BBA00.109_1043137791 | 3915 | laminin, gamma 1 (formerly LAMB2) | 162 | 14 |
| 13 | BBA00.140_1043143542 | 5819 | poliovirus receptor-related 2 (herpesvirus entry mediator B) | 162 | 12 |
| 2 | BBA00.036_1043143937 | 5864 | RAB3A, member RAS oncogene family | 161 | 7 |
| 17 | BBA00.251_1043141343 | 80728 | Rho GTPase activating protein 39 | 156 | 16 |
| 8 | BBA00.068_1043138278 | 5982 | replication factor C (activator 1) 2, 40 kDa | 153 | 13 |
| 26 | BBA00.365_1043144408 | 3320 | heat shock protein 90 kDa alpha (cytosolic), class A member 1 | 144 | 5 |
| 23 | BBA00.340_1043138937 | 65109 | UPF3 regulator of nonsense transcripts homolog B (yeast) | 138 | 16 |
| 1 | BBA00.032_1043143271 | 57136 | chromosome 20 open reading frame 3 | 134 | 18 |
| 6 | BBA00.065_1043140868 | 79582 | sperm associated antigen 16 | 133 | 16.5 |
| 9 | BBA00.075_1043137831 | 5370 | pro-melanin-concentrating hormone-like 2, pseudogene | 127 | 11.5 |
| 7 | BBA00.066_1043142796 | 10075 | HECT, UBA and WWE domain containing 1 | 125 | 15 |
| 12 | BBA00.134_1043141344 | 4744 | neurofilament, heavy polypeptide | 115 | 13 |
| 15 | BBA00.201_1043143257 | 2037 | erythrocyte membrane protein band 4.1-like 2 | 115 | 18 |
| 20 | BBA00.308_1043136631 | 23114 | neurofascin | 112 | 17 |
| 24 | BBA00.341_1043144416 | 7316 | ubiquitin C | 108 | 20 |
| 18 | BBA00.288_1043143161 | 10436 | EMG1 nucleolar protein homolog (S. cerevisiae) | 102 | 12 |
| 4 | BBA00.047_1043136648 | 627 | brain-derived neurotrophic factor | 99 | 13 |
| 14 | BBA00.198_1043136831 | 2935 | G1 to S phase transition 1 | 98 | 14.5 |
| 21 | BBA00.311_1043143356 | 5831 | pyrroline-5-carboxylate reductase 1 | 93 | 15 |
| 3 | BBA00.044_1043136937 | 25841 | ankyrin repeat and BTB (POZ) domain containing 2 | 82 | 15 |

TABLE 4.4
NMO vs. healthy controls
Ranking list of PPLS-DA results (TOP 30 antigens based on 200 runs) based on antigens
without AQP-4 and with freq >/=100 or (freq >/=80 and median rank </=16).

| | ProteinID | GeneID | Gene.Name | abs.loading.weight.comp.1. |
|---|---|---|---|---|
| x.BBA00.347_1043135290 | BBA00.347_1043135290 | 11054 | opioid growth factor receptor | 0.34087 |
| x.BBA00.365_1043144408 | BBA00.365_1043144408 | 3320 | heat shock protein 90 kDa alpha | 0.26728 |
| | | | (cytosolic), class A member 1 | |
| x.BBA00.315_1043143926 | BBA00.315_1043143926 | 10445 | microspherule protein 1 | 0.24583 |
| x.BBA00.392_1043140856 | BBA00.392_1043140856 | 23608 | makorin ring finger protein 1 | 0.24173 |
| x.BBA00.205_1043143644 | BBA00.205_1043143644 | 57455 | REX1, RNA exonuclease 1 homolog | 0.20385 |
| | | | (S. cerevisiae) | |
| x.BBA00.119_1043136825 | BBA00.119_1043136825 | 324 | adenomatous polyposis coli | 0.20278 |
| x.BBA00.075_1043137831 | BBA00.075_1043137831 | 5370 | pro-melanin-concentrating hormone-like 2, | 0.20127 |
| | | | pseudogene | |
| x.BBA00.036_1043143937 | BBA00.036_1043143937 | 5864 | RAB3A, member RAS oncogene family | 0.19844 |
| x.BBA00.288_1043143161 | BBA00.288_1043143161 | 10436 | EMG1 nucleolar protein homolog | 0.19741 |
| | | | (S. cerevisiae) | |
| x.BBA00.059_1043138765 | BBA00.059_1043138765 | 58506 | SR-related CTD-associated factor 1 | 0.19537 |
| x.BBA00.298_1043143832 | BBA00.298_1043143832 | 55827 | DDB1 and CUL4 associated factor 6 | 0.19032 |
| x.BBA00.065_1043140868 | BBA00.065_1043140868 | 79582 | sperm associated antigen 16 | 0.18421 |
| x.BBA00.068_1043138278 | BBA00.068_1043138278 | 5982 | replication factor C (activator 1) 2, 40 kDa | 0.18361 |
| x.BBA00.047_1043136648 | BBA00.047_1043136648 | 627 | brain-derived neurotrophic factor | 0.18254 |
| x.BBA00.032_1043143271 | BBA00.032_1043143271 | 57136 | chromosome 20 open reading frame 3 | 0.18069 |
| x.BBA00.109_1043137791 | BBA00.109_1043137791 | 3915 | laminin, gamma 1 (formerly LAMB2) | 0.17799 |
| x.BBA00.140_1043143542 | BBA00.140_1043143542 | 5819 | poliovirus receptor-related 2 (herpesvirus | 0.17400 |
| | | | entry mediator B) | |
| x.BBA00.251_1043141343 | BBA00.251_1043141343 | 80728 | Rho GTPase activating protein 39 | 0.17348 |
| x.BBA00.201_1043143257 | BBA00.201_1043143257 | 2037 | erythrocyte membrane protein band | 0.16699 |
| | | | 4.1-like 2 | |
| x.BBA00.340_1043138937 | BBA00.340_1043138937 | 65109 | UPF3 regulator of nonsense transcripts | 0.16068 |
| | | | homolog B (yeast) | |
| x.BBA00.044_1043136937 | BBA00.044_1043136937 | 25841 | ankyrin repeat and BTB (POZ) domain | 0.15194 |
| | | | containing 2 | |
| x.BBA00.066_1043142796 | BBA00.066_1043142796 | 10075 | HECT, UBA and WWE domain | 0.15067 |
| | | | containing 1 | |
| x.BBA00.134_1043141344 | BBA00.134_1043141344 | 4744 | neurofilament, heavy polypeptide | 0.14964 |
| x.BBA00.341_1043144416 | BBA00.341_1043144416 | 7316 | ubiquitin C | 0.13914 |
| x.BBA00.311_1043143356 | BBA00.311_1043143356 | 5831 | pyrroline-5-carboxylate reductase 1 | 0.13672 |
| x.BBA00.308_1043136631 | BBA00.308_1043136631 | 23114 | neurofascin | 0.13444 |
| x.BBA00.198_1043136831 | BBA00.198_1043136831 | 2935 | G1 to S phase transition 1 | 0.11788 |

TABLE 4.5
NMO vs MS
Ranking list and panel definition according to PPLS-DA TOP 30 (200 runs) based on all
antigens (NMO vs. MS). Data is shown only for antigens with freq >/=100 or (freq. >/=80
and median rank </=16).

| | ProteinID | GeneID | Gene.Name | freq | median rank |
|---|---|---|---|---|---|
| 4 | BBA00.068_1043138278 | 5982 | replication factor C (activator 1) 2, 40 kDa | 192 | 9 |
| 20 | BBA00.324_1043137810 | 27344 | proprotein convertase subtilisin/kexin type 1 inhibitor | 179 | 4 |
| 14 | BBA00.280_1043143162 | 11019 | lipoic acid synthetase | 170 | 13 |
| 5 | BBA00.080_1043143745 | No Gene ID | NA | 168 | 7 |
| 15 | BBA00.295_1043138939 | 1938 | eukaryotic translation elongation factor 2 | 166 | 10 |
| 2 | BBA00.035_1043138758 | 4775 | nuclear factor of activated T-cells, cytoplasmic, | 165 | 11 |
| | | | calcineurin-dependent 3 | | |
| 27 | BBA00.392_1043140856 | 23608 | makorin ring finger protein 1 | 163 | 7 |
| 1 | BBA00.027_1043138757 | 4155 | myelin basic protein | 157 | 12 |
| 11 | BBA00.242_0105509577 | 79155 | TNFAIP3 interacting protein 2 | 156 | 16 |
| 7 | BBA00.189_1043143648 | 84893 | F-box protein, helicase, 18 | 148 | 9 |
| 3 | BBA00.059_1043138765 | 58506 | SR-related CTD-associated factor 1 | 146 | 10 |
| 17 | BBA00.311_1043143356 | 5831 | pyrroline-5-carboxylate reductase 1 | 146 | 17 |
| 6 | BBA00.172_1043140859 | 119032 | chromosome 10 open reading frame 32 | 141 | 7 |
| 8 | BBA00.201_1043143257 | 2037 | erythrocyte membrane protein band 4.1-like 2 | 134 | 11 |
| 10 | BBA00.210_1043140481 | 64129 | tubulointerstitial nephritis antigen-like 1 | 129 | 8 |
| 29 | BBA00.400_1043140097 | 10081 | programmed cell death 7 | 125 | 16 |
| 18 | BBA00.317_1043144508 | 4122 | mannosidase, alpha, class 2A, member 2 | 123 | 20.5 |
| 28 | BBA00.395_1043138265 | 7416 | voltage-dependent anion channel 1 | 123 | 19 |
| 26 | BBA00.354_1043142586 | 7431 | vimentin | 119 | 17 |
| 19 | BBA00.323_1043135298 | 51510 | chromatin modifying protein 5 | 117 | 19 |
| 24 | BBA00.343_1043143350 | 6152 | ribosomal protein L24 | 117 | 17 |
| 16 | BBA00.302_1043135287 | 6130 | ribosomal protein L7a | 113 | 12 |
| 25 | BBA00.351_1043144220 | 128866 | chromatin modifying protein 4B | 113 | 17 |
| 23 | BBA00.335_1043143351 | 3068 | hepatoma-derived growth factor | 112 | 11 |
| 9 | BBA00.203_1043143552 | 4924 | nucleobindin 1 | 100 | 11 |
| 21 | BBA00.328_1043140473 | 6434 | transformer 2 beta homolog (Drosophila) | 94 | 13.5 |
| 12 | BBA00.252_1043144317 | 339230 | coiled-coil domain containing 137 | 93 | 15 |
| 13 | BBA00.263_1043138267 | 23646 | phospholipase D family, member 3 | 93 | 7 |
| 22 | BBA00.333_1043144502 | 375690 | WAS protein family homolog 5 pseudogene | 83 | 13.5 |

TABLE 4.6
NMO vs MS
Ranking list of PPLS-DA results based on antigens with freq >/=100 or (freq >/=80 and
median rank </=16). This ranking was obtained from a ranking list and panel definition
according to PPLS-DA TOP 30 (200 runs) based on all antigens.

| | ProteinID | GeneID | Gene.Name | abs.loading.weight.comp.1. |
|---|---|---|---|---|
| x.BBA00.260_1043136934 | BBA00.260_1043136934 | 361 | aquaporin 4 | 0.43483 |
| x.BBA00.324_1043137810 | BBA00.324_1043137810 | 27344 | proprotein convertase subtilisin/kexin | 0.24482 |
| | | | type 1 inhibitor | |
| x.BBA00.392_1043140856 | BBA00.392_1043140856 | 23608 | makorin ring finger protein 1 | 0.22539 |
| x.BBA00.080_1043143745 | BBA00.080_1043143745 | No | NA | 0.21189 |
| | | Gene | | |
| | | ID | | |
| x.BBA00.189_1043143648 | BBA00.189_1043143648 | 84893 | F-box protein, helicase, 18 | 0.20617 |
| x.BBA00.035_1043138758 | BBA00.035_1043138758 | 4775 | nuclear factor of activated T-cells, | 0.19922 |
| | | | cytoplasmic, calcineurin-dependent 3 | |
| x.BBA00.295_1043138939 | BBA00.295_1043138939 | 1938 | eukaryotic translation elongation factor 2 | 0.19893 |
| x.BBA00.059_1043138765 | BBA00.059_1043138765 | 58506 | SR-related CTD-associated factor 1 | 0.19819 |
| x.BBA00.068_1043138278 | BBA00.068_1043138278 | 5982 | replication factor C (activator 1) 2, 40 kDa | 0.19374 |
| x.BBA00.027_1043138757 | BBA00.027_1043138757 | 4155 | myelin basic protein | 0.18682 |
| x.BBA00.335_1043143351 | BBA00.335_1043143351 | 3068 | hepatoma-derived growth factor | 0.17965 |
| x.BBA00.280_1043143162 | BBA00.280_1043143162 | 11019 | lipoic acid synthetase | 0.17895 |
| x.BBA00.311_1043143356 | BBA00.311_1043143356 | 5831 | pyrroline-5-carboxylate reductase 1 | 0.16419 |
| x.BBA00.400_1043140097 | BBA00.400_1043140097 | 10081 | programmed cell death 7 | 0.16210 |
| x.BBA00.354_1043142586 | BBA00.354_1043142586 | 7431 | vimentin | 0.16168 |
| x.BBA00.242_0105509577 | BBA00.242_0105509577 | 79155 | TNFAIP3 interacting protein 2 | 0.15911 |
| x.BBA00.333_1043144502 | BBA00.333_1043144502 | 375690 | WAS protein family homolog 5 | 0.15897 |
| | | | pseudogene | |
| x.BBA00.351_1043144220 | BBA00.351_1043144220 | 128866 | chromatin modifying protein 4B | 0.15808 |
| x.BBA00.328_1043140473 | BBA00.328_1043140473 | 6434 | transformer 2 beta homolog (Drosophila) | 0.15124 |
| x.BBA00.343_1043143350 | BBA00.343_1043143350 | 6152 | ribosomal protein L24 | 0.14977 |
| x.BBA00.172_1043140859 | BBA00.172_1043140859 | 119032 | chromosome 10 open reading frame 32 | 0.14915 |
| x.BBA00.201_1043143257 | BBA00.201_1043143257 | 2037 | erythrocyte membrane protein band | 0.14367 |
| | | | 4.1-like 2 | |
| x.BBA00.210_1043140481 | BBA00.210_1043140481 | 64129 | tubulointerstitial nephritis antigen-like 1 | 0.14364 |
| x.BBA00.323_1043135298 | BBA00.323_1043135298 | 51510 | chromatin modifying protein 5 | 0.14331 |
| x.BBA00.317_1043144508 | BBA00.317_1043144508 | 4122 | mannosidase, alpha, class 2A, member 2 | 0.13510 |
| x.BBA00.395_1043138265 | BBA00.395_1043138265 | 7416 | voltage-dependent anion channel 1 | 0.12820 |
| x.BBA00.302_1043135287 | BBA00.302_1043135287 | 6130 | ribosomal protein L7a | 0.12354 |
| x.BBA00.203_1043143552 | BBA00.203_1043143552 | 4924 | nucleobindin 1 | 0.11654 |
| x.BBA00.263_1043138267 | BBA00.263_1043138267 | 23646 | phospholipase D family, member 3 | 0.09830 |

TABLE 4.7
NMO vs MS
Antigens (without AQP-4) with freq >/=100 or (freq >/=80 and median rank </=16. This
data was obtained from a ranking list and panel definition according to PPLS-DA TOP 30
(200 runs) based on all antigens without AQP-4.

| | ProteinID | GeneID | Gene.Name | freq | median rank |
|---|---|---|---|---|---|
| 4 | BBA00.068_1043138278 | 5982 | replication factor C (activator 1) 2, 40 kDa | 192 | 9 |
| 20 | BBA00.324_1043137810 | 27344 | proprotein convertase subtilisin/kexin type 1 inhibitor | 179 | 4 |
| 14 | BBA00.280_1043143162 | 11019 | lipoic acid synthetase | 170 | 13 |
| 5 | BBA00.080_1043143745 | No Gene ID | NA | 168 | 7 |
| 15 | BBA00.295_1043138939 | 1938 | eukaryotic translation elongation factor 2 | 166 | 10 |
| 2 | BBA00.035_1043138758 | 4775 | nuclear factor of activated T-cells, cytoplasmic, | 165 | 11 |
| | | | calcineurin-dependent 3 | | |
| 27 | BBA00.392_1043140856 | 23608 | makorin ring finger protein 1 | 163 | 7 |
| 1 | BBA00.027_1043138757 | 4155 | myelin basic protein | 157 | 12 |
| 11 | BBA00.242_0105509577 | 79155 | TNFAIP3 interacting protein 2 | 156 | 16 |
| 7 | BBA00.189_1043143648 | 84893 | F-box protein, helicase, 18 | 148 | 9 |
| 3 | BBA00.059_1043138765 | 58506 | SR-related CTD-associated factor 1 | 146 | 10 |
| 17 | BBA00.311_1043143356 | 5831 | pyrroline-5-carboxylate reductase 1 | 146 | 17 |
| 6 | BBA00.172_1043140859 | 119032 | chromosome 10 open reading frame 32 | 141 | 7 |
| 8 | BBA00.201_1043143257 | 2037 | erythrocyte membrane protein band 4.1-like 2 | 134 | 11 |
| 10 | BBA00.210_1043140481 | 64129 | tubulointerstitial nephritis antigen-like 1 | 129 | 8 |
| 29 | BBA00.400_1043140097 | 10081 | programmed cell death 7 | 125 | 16 |
| 18 | BBA00.317_1043144508 | 4122 | mannosidase, alpha, class 2A, member 2 | 123 | 20.5 |
| 28 | BBA00.395_1043138265 | 7416 | voltage-dependent anion channel 1 | 123 | 19 |
| 26 | BBA00.354_1043142586 | 7431 | vimentin | 119 | 17 |
| 19 | BBA00.323_1043135298 | 51510 | chromatin modifying protein 5 | 117 | 19 |
| 24 | BBA00.343_1043143350 | 6152 | ribosomal protein L24 | 117 | 17 |
| 16 | BBA00.302_1043135287 | 6130 | ribosomal protein L7a | 113 | 12 |
| 25 | BBA00.351_1043144220 | 128866 | chromatin modifying protein 4B | 113 | 17 |
| 23 | BBA00.335_1043143351 | 3068 | hepatoma-derived growth factor | 112 | 11 |
| 9 | BBA00.203_1043143552 | 4924 | nucleobindin 1 | 100 | 11 |
| 21 | BBA00.328_1043140473 | 6434 | transformer 2 beta homolog (Drosophila) | 94 | 13.5 |
| 12 | BBA00.252_1043144317 | 339230 | coiled-coil domain containing 137 | 93 | 15 |
| 13 | BBA00.263_1043138267 | 23646 | phospholipase D family, member 3 | 93 | 7 |
| 22 | BBA00.333_1043144502 | 375690 | WAS protein family homolog 5 pseudogene | 83 | 13.5 |

TABLE 4.8
NMO vs MS
Ranking list of PPLS-DA results based on antigens (without AQP-4) with freq >/=100 or
(freq >/=80 and median rank </=16). The data was obtained from ranking list and panel
definition according to PPLS-DA TOP 30 (200 runs) based on all antigens without AQP-4.

| | ProteinID | GeneID | Gene.Name | abs.loading.weight.comp.1. |
|---|---|---|---|---|
| x.BBA00.324_1043137810 | BBA00.324_1043137810 | 27344 | proprotein convertase subtilisin/kexin | 0.27926 |
| | | | type 1 inhibitor | |
| x.BBA00.392_1043140856 | BBA00.392_1043140856 | 23608 | makorin ring finger protein 1 | 0.27348 |
| x.BBA00.189_1043143648 | BBA00.189_1043143648 | 84893 | F-box protein, helicase, 18 | 0.24841 |
| x.BBA00.080_1043143745 | BBA00.080_1043143745 | No | NA | 0.23627 |
| | | Gene | | |
| | | ID | | |
| x.BBA00.059_1043138765 | BBA00.059_1043138765 | 58506 | SR-related CTD-associated factor 1 | 0.23544 |
| x.BBA00.335_1043143351 | BBA00.335_1043143351 | 3068 | hepatoma-derived growth factor | 0.22899 |
| x.BBA00.295_1043138939 | BBA00.295_1043138939 | 1938 | eukaryotic translation elongation factor 2 | 0.22314 |
| x.BBA00.035_1043138758 | BBA00.035_1043138758 | 4775 | nuclear factor of activated T-cells, | 0.21771 |
| | | | cytoplasmic, calcineurin-dependent 3 | |
| x.BBA00.027_1043138757 | BBA00.027_1043138757 | 4155 | myelin basic protein | 0.20552 |
| x.BBA00.068_1043138278 | BBA00.068_1043138278 | 5982 | replication factor C (activator 1) 2, 40 kDa | 0.19991 |
| x.BBA00.333_1043144502 | BBA00.333_1043144502 | 375690 | WAS protein family homolog 5 | 0.19416 |
| | | | pseudogene | |
| x.BBA00.280_1043143162 | BBA00.280_1043143162 | 11019 | lipoic acid synthetase | 0.19006 |
| x.BBA00.354_1043142586 | BBA00.354_1043142586 | 7431 | vimentin | 0.18441 |
| x.BBA00.328_1043140473 | BBA00.328_1043140473 | 6434 | transformer 2 beta homolog (Drosophila) | 0.17953 |
| x.BBA00.400_1043140097 | BBA00.400_1043140097 | 10081 | programmed cell death 7 | 0.17719 |
| x.BBA00.311_1043143356 | BBA00.311_1043143356 | 5831 | pyrroline-5-carboxylate reductase 1 | 0.17545 |
| x.BBA00.351_1043144220 | BBA00.351_1043144220 | 128866 | chromatin modifying protein 4B | 0.17456 |
| x.BBA00.242_0105509577 | BBA00.242_0105509577 | 79155 | TNFAIP3 interacting protein 2 | 0.16367 |
| x.BBA00.343_1043143350 | BBA00.343_1043143350 | 6152 | ribosomal protein L24 | 0.15860 |
| x.BBA00.323_1043135298 | BBA00.323_1043135298 | 51510 | chromatin modifying protein 5 | 0.15775 |
| x.BBA00.172_1043140859 | BBA00.172_1043140859 | 119032 | chromosome 10 open reading frame 32 | 0.13622 |
| x.BBA00.317_1043144508 | BBA00.317_1043144508 | 4122 | mannosidase, alpha, class 2A, member 2 | 0.13588 |
| x.BBA00.201_1043143257 | BBA00.201_1043143257 | 2037 | erythrocyte membrane protein band | 0.13389 |
| | | | 4.1-like 2 | |
| x.BBA00.210_1043140481 | BBA00.210_1043140481 | 64129 | tubulointerstitial nephritis antigen-like 1 | 0.13054 |
| x.BBA00.395_1043138265 | BBA00.395_1043138265 | 7416 | voltage-dependent anion channel 1 | 0.12765 |
| x.BBA00.252_1043144317 | BBA00.252_1043144317 | 339230 | coiled-coil domain containing 137 | 0.11655 |
| x.BBA00.302_1043135287 | BBA00.302_1043135287 | 6130 | ribosomal protein L7a | 0.11465 |
| x.BBA00.203_1043143552 | BBA00.203_1043143552 | 4924 | nucleobindin 1 | 0.10603 |
| x.BBA00.263_1043138267 | BBA00.263_1043138267 | 23646 | phospholipase D family, member 3 | 0.08149 |

### Combined Analysis Results:

TABLE 5.1
NMO vs healthy controls
Overlap of panels from univariate (Ranking based on scoring and “edge candidates”
resulting from volcano plot) and multivariate analysis (Ranking based on PPLS-DA) with
AQP-4.

| | ProteinID | GeneID | BBA Set | Gene Name |
|---|---|---|---|---|
| 1 | BBA00.047_1043136648 | 627 | BBA00 | brain-derived neurotrophic factor |
| 2 | BBA00.059_1043138765 | 58506 | BBA00 | SR-related CTD-associated factor 1 |
| 3 | BBA00.068_1043138278 | 5982 | BBA00 | replication factor C (activator 1) 2, 40 kDa |
| 4 | BBA00.075_1043137831 | 5370 | BBA00 | pro-melanin-concentrating hormone-like 2, pseudogene |
| 5 | BBA00.109_1043137791 | 3915 | BBA00 | laminin, gamma 1 (formerly LAMB2) |
| 6 | BBA00.119_1043136825 | 324 | BBA00 | adenomatous polyposis coli |
| 7 | BBA00.140_1043143542 | 5819 | BBA00 | poliovirus receptor-related 2 (herpesvirus entry mediator B) |
| 8 | BBA00.205_1043143644 | 57455 | BBA00 | REX1, RNA exonuclease 1 homolog (S. cerevisiae) |
| 9 | BBA00.260_1043136934 | 361 | BBA00 | aquaporin 4 |
| 10 | BBA00.288_1043143161 | 10436 | BBA00 | EMG1 nucleolar protein homolog (S. cerevisiae) |
| 11 | BBA00.298_1043143832 | 55827 | BBA00 | DDB1 and CUL4 associated factor 6 |
| 12 | BBA00.311_1043143356 | 5831 | BBA00 | pyrroline-5-carboxylate reductase 1 |
| 13 | BBA00.315_1043143926 | 10445 | BBA00 | microspherule protein 1 |
| 14 | BBA00.347_1043135290 | 11054 | BBA00 | opioid growth factor receptor |
| 15 | BBA00.365_1043144408 | 3320 | BBA00 | heat shock protein 90 kDa alpha (cytosolic), class A member 1 |
| 16 | BBA00.392_1043140856 | 23608 | BBA00 | makorin ring finger protein 1 |

TABLE 5.2
NMO vs. MS
Overlap of panels from univariate (Ranking based on scoring and “edge candidates”
resulting from volcano plot) and multivariate analysis (Ranking based on PPLS-DA) with
AQP-4.

| | ProteinID | GeneID | BBA Set | Gene Name |
|---|---|---|---|---|
| 1 | BBA00.027_1043138757 | 4155 | BBA00 | myelin basic protein |
| 2 | BBA00.035_1043138758 | 4775 | BBA00 | nuclear factor of activated T-cells, cytoplasmic, calcineurin-dependent 3 |
| 3 | BBA00.068_1043138278 | 5982 | BBA00 | replication factor C (activator 1) 2, 40 kDa |
| 4 | BBA00.080_1043143745 | No Gene ID | BBA00 | NA |
| 5 | BBA00.210_1043140481 | 64129 | BBA00 | tubulointerstitial nephritis antigen-like 1 |
| 6 | BBA00.260_1043136934 | 361 | BBA00 | aquaporin 4 |
| 7 | BBA00.288_1043143161 | 10436 | BBA00 | EMG1 nucleolar protein homolog (S. cerevisiae) |
| 8 | BBA00.295_1043138939 | 1938 | BBA00 | eukaryotic translation elongation factor 2 |
| 9 | BBA00.324_1043137810 | 27344 | BBA00 | proprotein convertase subtilisin/kexin type 1 inhibitor |
| 10 | BBA00.328_1043140473 | 6434 | BBA00 | transformer 2 beta homolog (Drosophila) |
| 11 | BBA00.340_1043138937 | 65109 | BBA00 | UPF3 regulator of nonsense transcripts homolog B (yeast) |
| 12 | BBA00.343_1043143350 | 6152 | BBA00 | ribosomal protein L24 |
| 13 | BBA00.376_1043143543 | 6838 | BBA00 | surfeit 6 |
| 14 | BBA00.392_1043140856 | 23608 | BBA00 | makorin ring finger protein 1 |

TABLE 5.3
NMO vs. healthy controls
Overlap of panels from univariate (Ranking based on scoring and “edge candidates”
resulting from volcano plot) and multivariate analysis (Ranking based on PPLS-DA) without
AQP-4.

| | ProteinID | GeneID | BBA Set | Gene Name |
|---|---|---|---|---|
| 1 | BBA00.044_1043136937 | 25841 | BBA00 | ankyrin repeat and BTB (POZ) domain containing 2 |
| 2 | BBA00.047_1043136648 | 627 | BBA00 | brain-derived neurotrophic factor |
| 3 | BBA00.059_1043138765 | 58506 | BBA00 | SR-related CTD-associated factor 1 |
| 4 | BBA00.068_1043138278 | 5982 | BBA00 | replication factor C (activator 1) 2, 40 kDa |
| 5 | BBA00.075_1043137831 | 5370 | BBA00 | pro-melanin-concentrating hormone-like 2, pseudogene |
| 6 | BBA00.109_1043137791 | 3915 | BBA00 | laminin, gamma 1 (formerly LAMB2) |
| 7 | BBA00.119_1043136825 | 324 | BBA00 | adenomatous polyposis coli |
| 8 | BBA00.140_1043143542 | 5819 | BBA00 | poliovirus receptor-related 2 (herpesvirus entry mediator B) |
| 9 | BBA00.205_1043143644 | 57455 | BBA00 | REX1, RNA exonuclease 1 homolog (S. cerevisiae) |
| 10 | BBA00.288_1043143161 | 10436 | BBA00 | EMG1 nucleolar protein homolog (S. cerevisiae) |
| 11 | BBA00.298_1043143832 | 55827 | BBA00 | DDB1 and CUL4 associated factor 6 |
| 12 | BBA00.311_1043143356 | 5831 | BBA00 | pyrroline-5-carboxylate reductase 1 |
| 13 | BBA00.315_1043143926 | 10445 | BBA00 | microspherule protein 1 |
| 14 | BBA00.347_1043135290 | 11054 | BBA00 | opioid growth factor receptor |
| 15 | BBA00.351_1043144220 | 128866 | BBA00 | chromatin modifying protein 4B |
| 16 | BBA00.365_1043144408 | 3320 | BBA00 | heat shock protein 90 kDa alpha (cytosolic), class A member 1 |
| 17 | BBA00.392_1043140856 | 23608 | BBA00 | makorin ring finger protein 1 |

TABLE 5.4
NMO vs. MS
Overlap of panels from univariate (Ranking based on scoring and “edge candidates”
resulting from volcano plot) and multivariate analysis (Ranking based on PPLS-DA)
without AQP-4.

| | ProteinID | GeneID | BBA Set | Gene Name |
|---|---|---|---|---|
| 1 | BBA00.027_1043138757 | 4155 | BBA00 | myelin basic protein |
| 2 | BBA00.035_1043138758 | 4775 | BBA00 | nuclear factor of activated T-cells, cytoplasmic, calcineurin-dependent 3 |
| 3 | BBA00.068_1043138278 | 5982 | BBA00 | replication factor C (activator 1) 2, 40 kDa |
| 4 | BBA00.080_1043143745 | No Gene ID | BBA00 | NA |
| 5 | BBA00.210_1043140481 | 64129 | BBA00 | tubulointerstitial nephritis antigen-like 1 |
| 6 | BBA00.288_1043143161 | 10436 | BBA00 | EMG1 nucleolar protein homolog (S. cerevisiae) |
| 7 | BBA00.295_1043138939 | 1938 | BBA00 | eukaryotic translation elongation factor 2 |
| 8 | BBA00.324_1043137810 | 27344 | BBA00 | proprotein convertase subtilisin/kexin type 1 inhibitor |
| 9 | BBA00.328_1043140473 | 6434 | BBA00 | transformer 2 beta homolog (Drosophila) |
| 10 | BBA00.340_1043138937 | 65109 | BBA00 | UPF3 regulator of nonsense transcripts homolog B (yeast) |
| 11 | BBA00.343_1043143350 | 6152 | BBA00 | ribosomal protein L24 |
| 12 | BBA00.376_1043143543 | 6838 | BBA00 | surfeit 6 |
| 13 | BBA00.392_1043140856 | 23608 | BBA00 | makorin ring finger protein 1 |

TABLE 5.5
NMO vs. healthy controls
Union of panels from univariate and multivariate analysis.

| | ProteinID | GeneID | BBA Set | Gene Name |
|---|---|---|---|---|
| 1 | BBA00.032_1043143271 | 57136 | BBA00 | chromosome 20 open reading frame 3 |
| 2 | BBA00.036_1043143937 | 5864 | BBA00 | RAB3A, member RAS oncogene family |
| 3 | BBA00.044_1043136937 | 25841 | BBA00 | ankyrin repeat and BTB (POZ) domain containing 2 |
| 4 | BBA00.047_1043136648 | 627 | BBA00 | brain-derived neurotrophic factor |
| 5 | BBA00.059_1043138765 | 58506 | BBA00 | SR-related CTD associated factor 1 |
| 6 | BBA00.065_1043140868 | 79582 | BBA00 | sperm associated antigen 16 |
| 7 | BBA00.066_1043142796 | 10075 | BBA00 | HECT, UBA and WWE domain containing 1 |
| 8 | BBA00.068_1043138278 | 5982 | BBA00 | replication factor C (activator 1) 2, 40 kDa |
| 9 | BBA00.075_1043137831 | 5370 | BBA00 | pro-melanin-concentrating hormone-like 2, pseudogene |
| 10 | BBA00.080_1043143745 | No Gene ID | BBA00 | NA |
| 11 | BBA00.109_1043137791 | 3915 | BBA00 | laminin, gamma 1 (formerly LAMB2) |
| 12 | BBA00.119_1043136825 | 324 | BBA00 | adenomatous polyposis coli |
| 13 | BBA00.134_1043141344 | 4744 | BBA00 | neurofilament, heavy polypeptide |
| 14 | BBA00.140_1043143542 | 5819 | BBA00 | poliovirus receptor-related 2 (herpesvirus entry mediator B) |
| 15 | BBA00.150_1043141334 | 7204 | BBA00 | triple functional domain (PTPRF interacting) |
| 16 | BBA00.198_1043136831 | 2935 | BBA00 | G1 to S phase transition 1 |
| 17 | BBA00.201_1043143257 | 2037 | BBA00 | erythrocyte membrane protein band 4.1-like 2 |
| 18 | BBA00.205_1043143644 | 57455 | BBA00 | REX1, RNA exonuclease 1 homolog (S. cerevisiae) |
| 19 | BBA00.210_1043140481 | 64129 | BBA00 | tubulointerstitial nephritis antigen-like 1 |
| 20 | BBA00.231_1043135293 | 10539 | BBA00 | glutaredoxin 3 |
| 21 | BBA00.237_1043135291 | 5595 | BBA00 | mitogen-activated protein kinase 3 |
| 22 | BBA00.251_1043141343 | 80728 | BBA00 | Rho GTPase activating protein 39 |
| 23 | BBA00.260_1043136934 | 361 | BBA00 | aquaporin 4 |
| 24 | BBA00.272_1043143163 | No Gene ID | BBA00 | NA |
| 25 | BBA00.284_1043136634 | 1270 | BBA00 | ciliary neurotrophic factor |
| 26 | BBA00.286_1043143930 | 4354 | BBA00 | membrane protein, palmitoylated 1, 55 kDa |
| 27 | BBA00.288_1043143161 | 10436 | BBA00 | EMG1 nucleolar protein homolog (S. cerevisiae) |
| 28 | BBA00.298_1043143832 | 55827 | BBA00 | DDB1 and CUL4 associated factor 6 |
| 29 | BBA00.308_1043136631 | 23114 | BBA00 | neurofascin |
| 30 | BBA00.311_1043143356 | 5831 | BBA00 | pyrroline 5 carboxylate reductase 1 |
| 31 | BBA00.315_1043143926 | 10445 | BBA00 | microspherule protein 1 |
| 32 | BBA00.320_1043140474 | 8874 | BBA00 | Rho guanine nucleotide exchange factor (GEF) 7 |
| 33 | BBA00.340_1043138937 | 65109 | BBA00 | UPF3 regulator of nonsense transcripts homolog B (yeast) |
| 34 | BBA00.341_1043144416 | 7316 | BBA00 | ubiquitin C |
| 35 | BBA00.347_1043135290 | 11054 | BBA00 | opioid growth factor receptor |
| 36 | BBA00.351_1043144220 | 128866 | BBA00 | chromatin modifying protein 4B |
| 37 | BBA00.365_1043144408 | 3320 | BBA00 | heat shock protein 90 kDa alpha (cytosolic), class A member 1 |
| 38 | BBA00.392_1043140856 | 23608 | BBA00 | makorin ring finger protein 1 |

TABLE 5.6
NMO vs. MS
Union of panels from univariate and multivariate analysis.

| | ProteinID | GeneID | BBA Set | Gene Name |
|---|---|---|---|---|
| 1 | BBA00.027_1043138757 | 4155 | BBA00 | myelin basic protein |
| 2 | BBA00.035_1043138758 | 4775 | BBA00 | nuclear factor of activated T-cells, cytoplasmic, calcineurin-dependent 3 |
| 3 | BBA00.059_1043138765 | 58506 | BBA00 | SR-related CTD-associated factor 1 |
| 4 | BBA00.068_1043138278 | 5982 | BBA00 | replication factor C (activator 1) 2, 40 kDa |
| 5 | BBA00.080_1043143745 | No Gene ID | BBA00 | NA |
| 6 | BBA00.119_1043136825 | 324 | BBA00 | adenomatous polyposis coli |
| 7 | BBA00.169_1043144025 | 90861 | BBA00 | hematological and neurological expressed 1-ike |
| 8 | BBA00.172_1043140859 | 119032 | BBA00 | chromosome 10 open reading frame 32 |
| 9 | BBA00.189_1043143648 | 84893 | BBA00 | F-box protein, helicase, 18 |
| 10 | BBA00.193_1043143261 | 10569 | BBA00 | SLU7 splicing factor homolog (S. cerevisiae) |
| 11 | BBA00.201_1043143257 | 2037 | BBA00 | erythrocyte membrane protein band 4.1-like 2 |
| 12 | BBA00.203_1043143552 | 4924 | BBA00 | nucleobindin 1 |
| 13 | BBA00.205_1043143644 | 57455 | BBA00 | REX1, RNA exonuclease 1 homoiog (S. cerevisiae) |
| 14 | BBA00.210_1043140481 | 64129 | BBA00 | tubulointerstitial nephritis antigen-like 1 |
| 15 | BBA00.213_1043140091 | 6461 | BBA00 | Src homology 2 domain containing adaptor protein B |
| 16 | BBA00.242_0105509577 | 79155 | BBA00 | TNFAIP3 interacting protein 2 |
| 17 | BBA00.252_1043144317 | 339230 | BBA00 | coiled-coil domain containing 137 |
| 18 | BBA00.260_1043136934 | 361 | BBA00 | aquaporin 4 |
| 19 | BBA00.263_1043138267 | 23646 | BBA00 | phospholipase D family, member 3 |
| 20 | BBA00.280_1043143162 | 11019 | BBA00 | lipoic acid synthetase |
| 21 | BBA00.288_1043143161 | 10436 | BBA00 | EMG1 nucleolar protein homolog (S. cerevisiae) |
| 22 | BBA00.295_1043138939 | 1938 | BBA00 | eukaryotic translation elongation factor 2 |
| 23 | BBA00.302_1043135287 | 6130 | BBA00 | ribosomal protein L7a |
| 24 | BBA00.311_1043143356 | 5831 | BBA00 | pyrroline-5-carboxylate reductase 1 |
| 25 | BBA00.317_1043144508 | 4122 | BBA00 | mannosidase, alpha, class 2A, member 2 |
| 26 | BBA00.323_1043135298 | 51510 | BBA00 | chromatin modifying protein 5 |
| 27 | BBA00.324_1043137810 | 27344 | BBA00 | proprotein convertase subtilisin/kexin type 1 inhibitor |
| 28 | BBA00.328_1043140473 | 6434 | BBA00 | transformer 2 beta homolog (Drosophila) |
| 29 | BBA00.333_1043144502 | 375690 | BBA00 | WAS protein family homolog 5 pseudogene |
| 30 | BBA00.335_1043143351 | 3068 | BBA00 | hepatoma-derived growth factor |
| 31 | BBA00.340_1043138937 | 65109 | BBA00 | UPF3 regulator of nonsense transcripts homolog B (yeast) |
| 32 | BBA00.343_1043143350 | 6152 | BBA00 | ribosomal protein L24 |
| 33 | BBA00.351_1043144220 | 128866 | BBA00 | chromatin modifying protein 4B |
| 34 | BBA00.354_1043142586 | 7431 | BBA00 | vimentin |
| 35 | BBA00.376_1043143543 | 6838 | BBA00 | surfeit 6 |
| 36 | BBA00.392_1043140856 | 23608 | BBA00 | makorin ring finger protein 1 |
| 37 | BBA00.395_1043138265 | 7416 | BBA00 | voltage-dependent anion channel 1 |
| 38 | BBA00.400_1043140097 | 10081 | BBA00 | programmed cell death 7 |

### REFERENCES

[0183] (1) Kuhle J, Petzold A (2011). What makes a prognostic biomarker in CNS diseases: strategies for targeted biomarker discovery? Part 2: chronic progressive and relapsing disease. Expert Opinion on Medical Diagnostics, Volume 5, Number 5, September, pp. 393-410(18).
[0184] (2) Lennon V A, Wingerchuk D M, Kryzer T J, Pittock S J, Lucchinetti C F, Fujihara K, Nakashima I, Weinshenker B G (2004). A serum autoantibody marker of neuromyelitis optica: distinction from multiple sclerosis. Lancet 364:2106-2112.
[0185] (3) Wingerchuk D M, Lennon V A, Pittock S J, Lucchinetti C F, Weinshenker B G. Revised diagnostic criteria for neuromyelitis optica. Neurology. 2006 May 23; 66(10):1485-9.
[0186] (4) Fazio R, Malosio M L, Lampasona V, De Feo D, Privitera D, Marnetto F, Centonze D, Ghezzi A, Comi G, Furlan R and Martino G (2009). Antiacquaporin 4 antibodies detection by different techniques in neuromyelitis optica patients. Multiple Sclerosis 15(10), pp. 1153-1163.
[0187] (5) Waters P, Vincent A (2008). Detection of anti-aquaporin-4 antibodies in neuromyelitis optica: current status of the assays. Int MS J. 2008 September; 15(3):99-105.
[0188] (6) Benjamini Y, Hochberg Y (1995). Controlling the false discovery rate: a practical and powerful approach to multiple testing. Journal of the Royal Statistical Society B, Vol. 57, 289-300.

The application's sequence listing, which the Patent Office published only in electronic form, follows.

SEQUENCE LISTING (870 sequences)

SEQ ID NO: 1 - DNA, 945 bp, Homo sapiens
caccatcaccatcacggtcgacccacgcgtccggaacacagagaagagattgatttgtcttcagttccatctttgcctgtgcctcatcctgctcagacccagaggccttcctctgattcagggtgttcacatgacagtgtactgtcaggacagagaagtttgatttgctccatcccacaaacatatgcatccatggtgacctcatcccatctgccacagttgcagtgtagagatgagagtgttagtaaagaacagcatatgattccttctccaattgtacaccagccttttcaagtcacaccaacacctcctgtggggtcttcctatcagcctatgcaaactaatgttgtgtacaatggaccaacttgtcttcctattaatgctgcctctagtcaagaatttgattcagttttgtttcagcaggatgcaactctttctggtttagtgaatcttggctgtcaaccactgtcatccataccatttcattcttcaaattcaggctcaacaggacatctcttagcccatacacctcattctgtgcataccctgcctcatctgcaatcaatgggatatcattgttcaaatacaggacaaagatctctttcttctccagtggctgaccagattacaggtcagccttcgtctcagttacaacctattacatatggtccttcacattcagggtctgctacaacagcttccccagcagcttctcatcccttggctagttcaccgctttctgggccaccatctcctcagcttcagcctatgccttaccaatctcctagctcaggaactgcctcatcaccgtctccagccaccagaatgcattctggacagcactcaactcaagcacaaagtacgggccaggggggtctttctgcaccttcatccttaatatgtcacagtttgtgtgatccagcgtcatttccacctgatggggca

SEQ ID NO: 2 - DNA, 872 bp, Homo sapiens
  misc_feature (799)..(799): n is a, c, g, or t
  misc_feature (837)..(837): n is a, c, g, or t
  misc_feature (870)..(870): n is a, c, g, or t
attagagagaattactatggagaggatcgcatcaccatcaccatcacgggatcctatttaggtgacactatagaatcgtcgacccacgcgtccgcccacgcgtccggtgagaacgtgttcaaggtctgtgacgagccccacccactgctggtaaaggagatgatccagcactgtgtgaatgccaacattgacgaagcctacaagattcttgctcacttgtggcatctgggctactcaccagaagatatcattggcaacatctttcgagtgtgtaaaactttccaaatggcagaatacctgaaactggagtttatcaaggaaattggatacactcacatgaaaatagcggaaggagtgaactctcttttgcagatggcaggcctcctggcaaggctgtgtcagaagacaatggccccggtggccagttagagcagagacttcactgactgacttacaggtgccctattctgaggtacaggagccgcggctttctgatgggggaaaatgccgccttaggctggagccaacatgactgtcctttaaactccagtggctggccaggcacggtggctcacgcctgtaatcccaacactttgggaggccgaggcaggtggatcacctgaggtcagaagttcgagaccagcctggccaacatggggaaaccctgtctttactaaaaatataaaaattagctgggtgtggtggcgggcacctgtaatcccagctactcgggaggctgtggcaggagaatcgcttgaacccaggaggtggaggttgcagtgagccaagatcacaccantgcactccagcctgggcgacagagtctccatctggggnaaaaaaattaaataaataaactcccgtgacttngc

SEQ ID NO: 3 - DNA, 604 bp, homo sapiens
gatatttatgagggagaaatttaacttatgagaggtcgcatcaccatcaccatcacggatcctatttaggtgacactatagaatcgtcgacccacgcgtccgcggacgcgtggggcagccgcagcggcggcggcgacgcgagcggcagcagcccgggccccgcggtagccgccagcgcggcacggccagcaggagcgccaggcgcgagcccgcggccactcgctgcctccggggcactgcgagaggctttgcgctccccagcgcggcgttcggactcggggccagcgcggccacggccgcgcacaaaggacagcagacgccgggactcgggggctgtgcccagggaccggcccggggacccccgcccgcgccgcgtcccctccacgcctcccctccccgggcggccggagcgcgagccggagcgggccccgtcatatgacagcggcgacgccgcagccggcgagcgcgcgtgctgcctgccccgctgcgccacggccgccggcgcctggggtggcccttgcctcgccccgctgagcggtcgcccgtcgccgccgccccgcgccccccgcgcccgggcttgcgggctccgggggaggatctaggg

SEQ ID NO: 4 - DNA, 975 bp, Homo sapiens
ccctaaagaaggaggaattaactatgagaggtcgcatcaccatcaccatcacggatcctatttaggtgacactatagaatcgtcgacccacgcgtccgatccagtcttgggaacgtactgggacaactgtaaccgttgcacctgccaggagaacaggcagtggcagtgtgaccaagaaccatgcctggtggatccagacatgatcaaagccatcaaccagggcaactatggctggcaggctgggaaccacagcgccttctggggcatgaccctggatgagggcattcgctaccgcctgggcaccatccgcccatcttcctcggtcatgaacatgcatgaaatttatacagtgctgaacccaggggaggtgcttcccacagccttcgaggcctctgagaagtggcccaacctgattcatgagcctcttgaccaaggcaactgtgcaggctcctgggccttctccacagcagctgtggcatccgatcgtgtctcaatccattctctgggacacatgacgcctgtcctgtcgccccagaacctgctgtcttgtgacacccaccagcagcagggctgccgcggtgggcgtctcgatggtgcctggtggttcctgcgtcgccgaggggtggtgtctgaccactgctaccccttctcgggccgtgaacgagacgaggctggccctgcgcccccctgtatgatgcacagccgagccatgggtcggggcaagcgccaggccactgcccactgccccaacagctatgttaataacaatgacatctaccaggtcactcctgtctaccgcctcggctccaacgacaaggagatcatgaaggagctgatggagaatggccctgtccaagccctcatggaggtgcatgaggacttcttcttatacaagggaggcatctacagccacacgccagtgagctttggaaggcagagagaaaccgccgggcatgggacccactcgtcaagata

SEQ ID NO: 5 - DNA, 844 bp, Homo sapiens
  misc_feature (2)..(2): n is a, c, g, or t
  misc_feature (673)..(673): n is a, c, g, or t
  misc_feature (678)..(678): n is a, c, g, or t
  misc_feature (732)..(732): n is a, c, g, or t
  misc_feature (740)..(740): n is a, c, g, or t
  misc_feature (761)..(761): n is a, c, g, or t
  misc_feature (782)..(782): n is a, c, g, or t
  misc_feature (790)..(790): n is a, c, g, or t
  misc_feature (795)..(795): n is a, c, g, or t
  misc_feature (804)..(804): n is a, c, g, or t
  misc_feature (812)..(812): n is a, c, g, or t
  misc_feature (818)..(819): n is a, c, g, or t
  misc_feature (823)..(823): n is a, c, g, or t
  misc_feature (833)..(834): n is a, c, g, or t
  misc_feature (843)..(843): n is a, c, g, or t
tnagaggagaaattaactatgagaggatcgcatcaccatcaccatcacggatcctatttaggtgacactatagaatcgtcgacccacgcgtccgatggattcaagcctcgtgaacgaagcggtggggagcaggcacaggactgggatgctctgccacccaagcggccccgactaggggcaggaaacaagatcggaggccgtaggcttattgtggtgctggaaggggccagtctggagacagtcaaggtagggaagacatatgagctactcaactgtgacaagcacaagtctatattgttgaagaatggacgggaccctggggaagcgcggccagatatcacccaccagagtttgctgatgctgatggatagtcccctgaaccgagctggcttgctacaggtttatatccatacacagaagaatgttctgattgaagtgaatccccagacccgaattcccagaacctttgaccgcttttgtggcctcatggttcaacttttacacaagctcagtgttcgagcagctgatggcccccagaagcttttgaaggtaattaagaatccagtatcagatcactttccagttggatgtatgaaagttggcacttctttttccatcccggttgtcagtgatgtgcgtgagctggtgcccagcagtgatcctattgtttttntgggnaggggcctttgcccatggcaaggtcagtgtggagtatacagaaaaagagggggnccatcagnaactacccccctttctggtgncctcacctgtgcaaaacttancacagccntttgnggaaaaatnggggggtnattttnnaagnaataaaaacnngttttgaanc

SEQ ID NO: 6 - DNA, 831 bp, Homo sapiens
atgagaggatcgcatcaccatcaccatcacggatcctatttaggtgacactatagaatcgtcgacccacgcgtccgcccacgcgcccacgcgtccgcccacgcgtccgggcgagcagaactacggcgagcgggaatcccgttctgcttccagaagtggaagtgctcacggatcggggaaatctgcaaggcatacccctgcaaggtctcgctccaaggaagattccaggcgttccagatcaaagtccaggtcccgatctgaatctaggtctagatccagaagaagctcccgaaggcattatacccggtcacggtctcgctcccgctcccatagacgatcacgtagcaggtcttacagtcgagattatcgtagacggcacagccacagccattctcccatgtctactcgcaggcgtcatgttgggaatcgggcaaatcctgatcctaactgttgtcttggagtatttgggctgagcttgtacaccacagaaagagatctaagagaagtgttctctaaatatggtcccattgccgatgtgtctattgtatatgaccagcagtctaggcgttcaagaggatttgcctttgtatattttgaaaatgtagatgatgccaaggaagctaaagaacgtgccaatggaatggagcttgatgggcgtaggatcagagttgatttctctataacaaaaagaccacatacgccaacaccaggaatttacatggggagacctacctatggcagctctcgccgtcgggattactatgacagaggatatgatcggggctatgatgatcgggactactatagcagatcatacagaggaggaggtgga

SEQ ID NO: 7 - DNA, 984 bp, Homo sapiens
ctatgagaggatcgcatcaccatcaccatcacggatcctatttaggtgacactatagaatcgtcgacccacgcgtccggagatgaaaaagaattggacaaaagagaaaaagccaagaaattggacaaagagaatctcagtgatgaaagagccagtgggcaaagttgtacattgcccaagcgttctgatagcgaacttaaagatgaaaaaccaaagagacctgaagatgagagcggcagagactatagggagagggaacgggaatatgaacgagatcaggagcgcatacttcgagaaagagagaggctgaagcggcaagaagaagagcgccgtaggcagaaggagcgctatgagaaagagaagacttttaagagaaaagaagaagaaatgaaaaaagagaaagacacacttcgggataaaggaaagaaggctgaaagtacagaatcaataggcagctcagaaaaaactgaaaagaaagaagaagtggtcaagagagatcgaataagaaacaaggatcgtccagcgatgcagctttaccaaccaggagctcgaagccgaaatcgactctgtccccctgatgacagcaccaagtctggagattcagcagcagaaaggaagcaggaaagtggtattagccatagaaaagaaggaggagaggagtgataagtccagatggccttaggtgtcctgactgtctaggcagccaaagagcacacgttaagcaatccagaggtgccttcagggcaaagaatagagagaaagggagccgctgtgctggtggggtacactgcagaggagtaagtcttgtgtcaaagcaggaatctgatcagaggttcagaattggaagtacaatttcattgcttttgcaatttctacaaattaattttaaagtgtcagaaaaaggtgacggcaaggacatgcattgcaatttgcagggggaattgtcaagtgaggacttcatcacatatgacacgagagaaagtaa

SEQ ID NO: 8 - DNA, 913 bp, Homo sapiens
ctatgagaggatcgcatcaccatcaccatcacggatcctatttaggtgacactatagaatcgtcgacccacgcgtccgggaagcacaaaaagggacagtcggaagaaattcaaaagaaaagaacccgccgagcagtcaaattccagagggccattactggtgcatctcttgctgatataatggccaagaggaatcagaaacctgaagttagaaaggctcaacgagaacaagctatcagggctgctaaggaagcaaaaaaggctaagcaagcatctaaaaagactgcaatggctgctgctaaggcacctacaaaggcagcacctaagcaaaagattgtgaagcctgtgaaagtttcagctccccgagttggtggaaaacgctaaactggcagattagatttttaaataaagattggattataaaaaaaaaaaaaaaaaaaaaaaaaaaaaaaaaaaaaaaaaaaaaaaagggcggccgctccctatagtgagtcgtattaagcttaattagctgagcttggactcctgttgatagatccagtaatgacctcagaactccatctggatttgttcagaacgctcggttgccgccgggcgttttttattggtgagaatccaagctagcttggcgagattttcaggagctaaggaagctaaaatggagaaaaaaatcactggatataccaccgttgatatatcccaatggcatcgtaaagaacattttgaggcatttcagtcagttgctcaatgtacctataaccagaccgttcagctggatattacggcctttttaaagaccgtaaagaaaaataagcacaagttttatccggcctttattcacattcttgcccgcctgatgaatgctcatccgggaatttcgtatggcaatgaaagacggtgagctggtgatatgg

SEQ ID NO: 9 - DNA, 932 bp, Homo sapiens
aggatcgcatcaccatcaccatcacggatcctatttaggtgacactatagaatcgtcgactatggcctctctactcgccaaggacgcctacctgcagagcctggccaagaagatctgctcccattcggccccggaacagcaggcgcgcacgcgggctggcaaaactcaaggctcagaaactgcagggcccccaaaaaagaaaaggaagaaaacacaaaagaaattccggaagcgagaagagaaggctgctgagcacaaggccaagtccttgggggagaaatctccagcagcctctggggccaggaggcctgaggcagccaaagaggaagcagcttgggcttccagctcagcagggaaccctgcagatggcctggccactgagcctgagtctgtctttgctctggatgttctgcgacagcgactgcatgagaagatccaggaggcccggggccagggcagtgccaaggagctgtcccctgccgccttggagaaaaggcggcggagaaagcaggaacgggaccggaagaagaggaagcgaaaggagctgtgggcgaaagagaaggccagtaaggctgaggaggccatggaggcccaggaggtggtggaggcaaccccagagggggcctgcacggagccgcgggagccgcccgggctgatcttcaataaggtggaggtgagcgaagacgagccggccagcaaggcgcagcgcagaaaagagaagaggcagagggtgaaggggaacctcacgccgctgaccgggaggaactaccggcagctgctggagcgcctgcaggcacggcagagccggctggacgagctgcgcggccaggatgaggggaaaggcgcaggagctggaggcgaagatgaagtggaccaacctcctctacaaggcggagggcgtgaagatccgtgacgacgaacgcctgctgcag

SEQ ID NO: 10 - DNA, 790 bp, Homo sapiens
atgagaggatcgcatcaccatcaccatcacggatcctatttaggtgacactatagaatcgtcgaccatggcggaggctgcaactcccggaacaacagccacaacatcaggagcaggagcggcagcggcgacggcggcagcagcctcccccaccccgatccccacagtcaccgccccgtccctgggggcgggcggagggggcggcggcagcgacggcagcggcggcggctggactaaacaggtcacctgcaggtattttatgcatggggtttgtaaggaaggagacaactgtcgctactcgcatgacctctctgacagtccgtatagtgtagtgtgcaagtattttcagcgagggtactgtatttatggagaccgctgcagatatgaacatagcaaaccattgaaacaggaagaagcaactgctacagagctaactacaaagtcatcccttgctgcttcctcaagtctctcatcgatagttggaccacttgttgaaatgaatacaggcgaagctgagtcaagaaattcaaactttgcaactgtaggagcaggttcagaggactgggtgaatgctattgagtttgttcctgggcaaccctactgtggccgtactgcgccttcctgcactgaagcacccctgcagggctcagtgaccaaggaagaatcagagaaagagcaaaccgccgtggagacaaagaagcagctgtgcctctatgctgcagtgggagagtgccgatacggggagaactgtgtgtatctctcacggagattcttgtgacatgtgtgggctg

SEQ ID NO: 11 - DNA, 1447 bp, Homo sapiens
  misc_feature (1381)..(1381): n is a, c, g, or t
  misc_feature (1427)..(1427): n is a, c, g, or t
aggccgccctaagagattctagagaggatgcatcaccatcaccatcacggtcgacccacgcgtccggcgccagagagaagcagcctccggccccggcggcccctgtctcccgaccccggaaggcgaagcaggctgcccggggaccccgcgcgtgggcgcttgaagccgagaccagcctgcccgggcctgggcaggcggagcagggccttggaccccgcggcgcccctcggcctcggagcaacgagcgcagcgccgcctctgaagagccaatccattcaggatgggaaaccacgcaggcaaacgagaattaaatgccgagaaggccagtacgaatagtgaaactaacagaggagaatctgaaaaaaagagaaacctgggtgaactttcacggacaacctcagaggacaacgaagtgttcggagaggcagatgcgaaccagaacaatgggacctcctctcaggacacagcggtgactgactccaagcgcacagcggacccgaagaatgcctggcaggatgcccacccagctgacccagggagccgcccccacttgatccgcctcttttcccgagatgccccggggagggaggacaacaccttcaaagacaggccctctgagtccgacgagctccagaccatccaagaagacagtgcagccacctccgagagcctggatgtgatggcgtcacagaagagaccctcccagaggcacggatccaagtacctggccacagcaagtaccatggaccatgccaggcatggcttcctcccaaggcacagagacacgggcatccttgactccatcgggcgcttctttggcggtgacaggggtgcgcccaagcggggctctggcaagtgagctctgaggagtagagaagttttaatttaaatggaaaaagcaaaggaaaaatcagtaagtggactcagcccttaaaggaaaacctggcacgtaacctcttgttgtctaagtctcgttccgggctggaaaagcatatgaacccaaaaggggggccctgagggctctttagaacttttcctttacctcccccctcctttcctcccagggaggtggcccgggcgggctcacaaatgaagaaatccctaatccgcctccaagagggcggacaagccccttacaaaaaaacccctctccgctctctggggcgatctcttcactacataaatgctccctccccccccaccacggtcacaatgactcaaccactctcctccataactatcacctcactcctccccacccaatccagcctaaaactatccatccacatgacaaccacctcataattctgagacctcacaacccctcacctaactctaaaaccttcctcccctaccacgtctaaatatccctccacctgancctcctactacccgcccctccacctccaccatccttcacttcgctnccatcctcccctctgcaccc

SEQ ID NO: 12 - DNA, 1189 bp, Homo sapiens
  misc_feature (899)..(899): n is a, c, g, or t
  misc_feature (916)..(916): n is a, c, g, or t
  misc_feature (919)..(919): n is a, c, g, or t
  misc_feature (921)..(921): n is a, c, g, or t
  misc_feature (954)..(954): n is a, c, g, or t
  misc_feature (956)..(956): n is a, c, g, or t
  misc_feature (978)..(978): n is a, c, g, or t
  misc_feature (995)..(995): n is a, c, g, or t
  misc_feature (1013)..(1013): n is a, c, g, or t
  misc_feature (1015)..(1015): n is a, c, g, or t
  misc_feature (1018)..(1018): n is a, c, g, or t
  misc_feature (1021)..(1021): n is a, c, g, or t
  misc_feature (1032)..(1032): n is a, c, g, or t
  misc_feature (1056)..(1056): n is a, c, g, or t
  misc_feature (1080)..(1080): n is a, c, g, or t
  misc_feature (1087)..(1087): n is a, c, g, or t
  misc_feature (1109)..(1109): n is a, c, g, or t
  misc_feature (1121)..(1121): n is a, c, g, or t
  misc_feature (1130)..(1130): n is a, c, g, or t
  misc_feature (1132)..(1132): n is a, c, g, or t
  misc_feature (1138)..(1138): n is a, c, g, or t
  misc_feature (1141)..(1141): n is a, c, g, or t
  misc_feature (1144)..(1144): n is a, c, g, or t
  misc_feature (1153)..(1153): n is a, c, g, or t
  misc_feature (1160)..(1160): n is a, c, g, or t
  misc_feature (1171)..(1172): n is a, c, g, or t
  misc_feature (1174)..(1174): n is a, c, g, or t
  misc_feature (1182)..(1182): n is a, c, g, or t
  misc_feature (1186)..(1186): n is a, c, g, or t
  misc_feature (1188)..(1189): n is a, c, g, or t
tagagaaaattaactatgagaggatcgcatcaccatcaccatcacggatcctatttaggtgacactatagaatcgtcgacccacgcgtccgcccacgcgtccggtcgacttctcctcggaggtgactgctgccctccgagtcaccgatggcgcattggtggtggtggactgcgtgtcaggcgtgtgcgtgcagacggagacagtgctgcggcaggccattgccgagcgcatcaagcctgtgctgatgatgaacaagatggaccgcgccctgctggagctgcagctggagcccgaggagctctaccagactttccagcgcatcgtggagaacgtgaacgtcatcatctccacctacggcgagggcgagagcggccccatgggcaacatcatgatcgatcctgtcctcggtaccgtgggctttgggtctggcctccacgggtgggccttcaccctgaagcagtttgccgagatgtatgtggccaagttcgccgccaagggggagggccagttggggcctgccgagcgggccaagaaagtagaggacatgatgaagaagctgtggggtgacaggtactttgacccagccaacggcaagttcagcaagtcagccaccagccccgaagggaagaagctgccacgcaccttctgccagctgatcctggaccccatcttcaaggtgtttgatgcgatcatgaatttcaagaaagaggagacagcaaaactgatagagaaactggacatcaaactggacagcgaggacaaggacaaagaaggcaaacccctgctgaaggctgtgatgcgccgctggctgcctgccggagacgccttgttgcagatgatcaccatccacctgccctcccctgtgacggcccaaaagtaccgctgcgagctcctgtacnaagggccccccggaacnacnangctgccatgggcattaaaagctgtgaccccaangnccctcttatgatgtatatttcnaaatggtgccaacctcnaaaaaggtcggttctacncnttnganaaatcttcccngggctggtctccctggcctgaagntcaggatcatggggcccaactaanccctggnaaaaagagaacctctactgaanccatccaaaaanaattttganangggccnctnctngaaccatcnaggaatngcttggggaanntntgggcctngggngnn

SEQ ID NO: 13 - DNA, 853 bp, Homo sapiens
  misc_feature (2)..(2): n is a, c, g, or t
  misc_feature (322)..(322): n is a, c, g, or t
  misc_feature (548)..(548): n is a, c, g, or t
  misc_feature (712)..(712): n is a, c, g, or t
  misc_feature (719)..(719): n is a, c, g, or t
  misc_feature (724)..(724): n is a, c, g, or t
  misc_feature (778)..(778): n is a, c, g, or t
  misc_feature (780)..(780): n is a, c, g, or t
  misc_feature (794)..(794): n is a, c, g, or t
  misc_feature (804)..(804): n is a, c, g, or t
  misc_feature (806)..(806): n is a, c, g, or t
  misc_feature (811)..(812): n is a, c, g, or t
  misc_feature (814)..(814): n is a, c, g, or t
  misc_feature (816)..(817): n is a, c, g, or t
  misc_feature (820)..(820): n is a, c, g, or t
  misc_feature (822)..(823): n is a, c, g, or t
  misc_feature (825)..(825): n is a, c, g, or t
  misc_feature (828)..(828): n is a, c, g, or t
  misc_feature (830)..(831): n is a, c, g, or t
  misc_feature (833)..(833): n is a, c, g, or t
  misc_feature (839)..(839): n is a, c, g, or t
  misc_feature (845)..(845): n is a, c, g, or t
  misc_feature (848)..(848): n is a, c, g, or t
antagagaaattactatgagaggatcgcatcaccatcaccatcacggatcctatttaggtgacactatagaatcgtcgacccacgcgtccggcctcgccagctcgccccggcactgcgcacttgccagccagtccgcccgtccggagcccggctcgctggggcagcatggcggggtcgccgctgctctgggggccgcgggccgggggcgtcggccttttggtgctgctgctgctcggcctgtttcggccgccccccgcgctctgcgcgcggccggtaaaggagccccgcggcctaagcgcagcgtctccgcccttggctganactggcgctcctcgccgcttccggcggtcagtgccccgaggtgaggcggcgggggcggtgcaggagctggcgcgggcgctggcgcatctgctggaggccgaacgtcaggagcgggcgcgggccgaggcgcaggaggctgaggatcagcaggcgcgcgtcctggcgcagctgctgcgcgtctggggcgccccccgcaactctgatccggctctgggcctggacgacnaccccgacgcgcctgcagcgcagctcgctcgcgctctgctccgcgcccgccttgaccctgccgccctcgcagcccagcttgtccccgcgcccgtccccgccgcggcgctccgaccccggcccccggtctacaacgacggccccgcgggcccggatgctgaagangcaggcnacaanacacccgacgtggaacccgaactgttgaagtacttgctgggacggattcttgcngnaaacgcggactccnaaggggtggnanccccnngncnnctncnncntgncnncnaacaanaatgtnggnctctg

SEQ ID NO: 14 - DNA, 1447 bp, Homo sapiens; identical to SEQ ID NO: 11
  misc_feature (1381)..(1381): n is a, c, g, or t
  misc_feature (1427)..(1427): n is a, c, g, or t

SEQ ID NO: 15 - DNA, 1189 bp, Homo sapiens; identical to SEQ ID NO: 12
  misc_feature (899)..(899): n is a, c, g, or t
  misc_feature (916)..(916): n is a, c, g, or t
  misc_feature (919)..(919): n is a, c, g, or t
  misc_feature (921)..(921): n is a, c, g, or t
  misc_feature (954)..(954): n is a, c, g, or t
  misc_feature (956)..(956): n is a, c, g, or t
  misc_feature (978)..(978): n is a, c, g, or t
  misc_feature (995)..(995): n is a, c, g, or t
  misc_feature (1013)..(1013): n is a, c, g, or t
  misc_feature (1015)..(1015): n is a, c, g, or t
  misc_feature (1018)..(1018): n is a, c, g, or t
  misc_feature (1021)..(1021): n is a, c, g, or t
  misc_feature (1032)..(1032): n is a, c, g, or t
  misc_feature (1056)..(1056): n is a, c, g, or t
  misc_feature (1080)..(1080): n is a, c, g, or t
  misc_feature (1087)..(1087): n is a, c, g, or t
  misc_feature (1109)..(1109): n is a, c, g, or t
  misc_feature (1121)..(1121): n is a, c, g, or t
  misc_feature (1130)..(1130): n is a, c, g, or t
  misc_feature (1132)..(1132): n is a, c, g, or t
  misc_feature (1138)..(1138): n is a, c, g, or t
  misc_feature (1141)..(1141): n is a, c, g, or t
  misc_feature (1144)..(1144): n is a, c, g, or t
  misc_feature (1153)..(1153): n is a, c, g, or t
  misc_feature (1160)..(1160): n is a, c, g, or t
  misc_feature (1171)..(1172): n is a, c, g, or t
  misc_feature (1174)..(1174): n is a, c, g, or t
  misc_feature (1182)..(1182): n is a, c, g, or t
  misc_feature (1186)..(1186): n is a, c, g, or t
  misc_feature (1188)..(1189): n is a, c, g, or t

SEQ ID NO: 16 - DNA, 853 bp, Homo sapiens; identical to SEQ ID NO: 13
  misc_feature (2)..(2): n is a, c, g, or t
  misc_feature (322)..(322): n is a, c, g, or t
  misc_feature (548)..(548): n is a, c, g, or t
  misc_feature (712)..(712): n is a, c, g, or t
  misc_feature (719)..(719): n is a, c, g, or t
  misc_feature (724)..(724): n is a, c, g, or t
  misc_feature (778)..(778): n is a, c, g, or t
  misc_feature (780)..(780): n is a, c, g, or t
  misc_feature (794)..(794): n is a, c, g, or t
  misc_feature (804)..(804): n is a, c, g, or t
  misc_feature (806)..(806): n is a, c, g, or t
  misc_feature (811)..(812): n is a, c, g, or t
  misc_feature (814)..(814): n is a, c, g, or t
  misc_feature (816)..(817): n is a, c, g, or t
  misc_feature (820)..(820): n is a, c, g, or t
  misc_feature (822)..(823): n is a, c, g, or t
  misc_feature (825)..(825): n is a, c, g, or t
  misc_feature (828)..(828): n is a, c, g, or t
  misc_feature (830)..(831): n is a, c, g, or t
  misc_feature (833)..(833): n is a, c, g, or t
  misc_feature (839)..(839): n is a, c, g, or t
  misc_feature (845)..(845): n is a, c, g, or t
  misc_feature (848)..(848): n is a, c, g, or t

SEQ ID NO: 17 - DNA, 2430 bp, Homo sapiens
ggtaccgtcgaccatggaagaggaagatgaatctcgcggtaaaaccgaagaaagcggtgaagatcgtggtgatggtccgcctgatcgtgatccgaccctgagccctagcgcatttattctgcgtgcaattcagcaggcagttggtagcagcctgcagggtgatctgccgaatgataaagatggtagccgttgtcatggtctgcgttggcgtcgttgtcgttctccgcgtagcgaaccgcgtagccaggaatctggcggtacagataccgcaaccgttctggatatggcaaccgatagctttctggcaggtctggttagcgttctggaccctccggatacctgggttccgagccgtctggatctgcgtccgggtgaaagcgaagatatgctggaactggttgcagaagttcgtattggcgatcgcgatccgattccgctgccggttccgtcactgctgcctcgtctgcgtgcatggcgtaccggtaaaaccgtttctccgcagagcaatagcagccgtccgacctgtgcacgtcatctgactctgggcactggtgatggtggtcctgcaccacctccagcaccgagcagcgcaagcagctctccgagcccgagcccgtctagctctagtccgtcacctccaccgcctccacctccgccagctcctccagcacctccggctccgcgttttgatatttatgatccgtttcatccgaccgatgaagcatattctccgccaccggcaccggaacagaaatatgatccttttgaaccgaccggtagcaatccgagcagcagcgcaggtacaccgtcaccggaagaagaggaagaggaagaagaagaagaggaagaggaagaagaggacgaagaagaagaagagggtctgagccagagcattagccgtattagcgaaaccctggcaggcatttatgatgataatagcctgagccaggattttccgggtgatgaatctccgcgtccggatgcacagccgactcagccgacccctgcacctggtacaccgcctcaggttgatagcacccgtgcagatggtgcaatgcgtcgtcgtgtttttgttgttggcaccgaagccgaagcatgtcgtgaaggtaaagttagcgttgaagttgttaccgcaggcggtgctgcactgcctcctccgctgctgccaccgggtgatagcgaaattgaagaaggtgaaatcgttcagccggaagaagaaccgcgtctggcactgagcctgtttcgtccgggtggtcgtgcagctcgtccgcctccggctgcatctgcaaccccgacagcacagccgctgcctcagcctcctgcaccgcgtgcaccggaaggtgatgattttctgagcctgcatgcagaatctgatggtgaaggtgcactgcaggttgatctgggtgaaccggctcctgcaccgcctgcagcagatagccgttggggtggtctggacctgcgtcgtaaaattctgacccagcgtcgtgaacgttatcgtcagcgtagcccgagtcctgcacctgctccagctccagcagcagcagccggtccgcctacccgtaaaaaaagccgtcgcgaacgcaaacgtagcggtgaagcaaaagaagcagcatctagcagctctggcacccaacctgcaccaccggctccggcaagcccgtgggatagcaaaaaacatcgtagccgtgatcgtaaaccgggtagccatgcaagcagctcagcacgtcgtcgtagccgtagccgttctcgtagccgttcaacccgtcgtcgttcacgtagcaccgatcgtcgtcgtggtggtagccgtcgttctcgttcacgtgaaaaacgtcgccgtcgtcgccgttctgcatcaccgccaccggctaccagcagtagctctagcagccgtcgcgaacgtcatcgtggtaaacatcgtgatggtggtggcagcaaaaaaaaaaaaaaacgtagccgcagccgtggtgaaaaacgttctggtgatggtagcgaaaaagctccggcaccggctcctccgccttccggtagcaccagctgtggtgatcgtgatagtcgtcgtcgtggcgcagttccgcctagcattcaggatctgaccgatcatgacctgtttgccattaaacgtaccattaccgttggtcgtctggataaaagcgatccgcgtggtccgtcaccagcaccggcaagcagcccgaaacgtgaagttctgtatgatagcgaaggtctgagcggtgaagaacgcggtggtaaaagcagccagaaagatcgtcgccgtagcggtgcagccagcagcagtagcagctctcgtgaaaaaggttcacgtcgcaaagcactggatggtggtgaccgtgaccgtgatcgtgaccgcgatcgggaccgtgatcgcagcagcaaaaaagcacgtcctccgaaagaataagcggccgcgagctc

SEQ ID NO: 18 - DNA, 2914 bp, Homo sapiens
ggcgcgccgtcgaccatggcagcagcaagctatgatcagctgctgaaacaggttgaagccctgaaaatggaaaatagcaatctgcgtcaggaactggaagataatagcaaccatctgaccaaactggaaaccgaagccagcaatatgaaagaagttctgaaacagctgcagggtagcattgaagatgaagcaatggcaagcagcggtcagattgatctgctggaacgtctgaaagaactgaatctggatagcagcaattttccgggtgttaaactgcgtagcaaaatgagcctgcgtagctatggtagccgtgaaggtagcgttagcagccgtagcggtgaatgttctccggttccgatgggtagctttccgcgtcgtggttttgttaatggttctcgcgaaagcaccggttatctggaagaactggaaaaagaacgtagcctgctgctggcagatctggataaagaagaaaaagaaaaagactggtattatgcacagctgcagaatctgacaaaacgtattgatagcctgccgctgaccgaaaattttagcctgcagaccgatatgacccgtcgtcagctggaatatgaagcacgtcagattcgtgttgcaatggaagaacagctgggcacctgtcaggatatggaaaaacgtgcacagcgtcgtattgcacgtattcagcagatcgaaaaagatattctgcgtattcgtcagctgctgcagagccaggcaaccgaagcagaacgtagcagccagaataaacatgaaaccggtagccatgatgcagaacgtcagaatgaaggtcagggtgtgggtgaaattaatatggcaaccagcggcaatggtcagggtagcaccacccgtatggatcatgaaaccgcaagcgttctgagcagcagcagcacccatagcgcaccgcgtcgtctgaccagccatctgggcaccaaagttgaaatggtttatagcctgctgagcatgctgggcacccatgataaagatgatatgagccgtaccctgctggcaatgagcagcagccaggatagctgtattagcatgcgtcagagcggttgtctgccgctgctgatccagctgctgcatggtaatgataaagatagcgtgctgctgggtaatagccgtggtagcaaagaagcacgcgcacgcgcaagcgcagcactgcataatattattcacagccagccggatgataaacgtggtcgtcgtgaaattcgtgttctgcatctgctggaacaaattcgtgcatattgtgaaacctgttgggaatggcaggaagcacacgaaccgggtatggatcaggataaaaatccgatgcctgcaccggttgaacatcagatttgtccggcagtttgtgttctgatgaaactgagctttgatgaagaacatcgtcatgcaatgaatgaactgggtggtctgcaggcaattgcagaactgctgcaggttgattgtgaaatgtatggcctgaccaacgatcattatagcattaccctgcgtcgctatgcaggcatggcactgaccaatctgacctttggtgatgttgcaaataaagcaaccctgtgtagcatgaaaggttgtatgcgtgcactggttgcacagctgaaaagcgaaagcgaagatctgcagcaggttattgccagcgttctgcgtaatctgagctggcgtgcagatgttaatagcaaaaaaaccctgcgtgaagttggtagcgttaaagcactgatggaatgtgccctggaagttaaaaaagaaagcaccctgaaaagcgttctgtctgcactgtggaatctgagcgcacattgtaccgaaaataaagccgatatttgtgcagttgatggtgcactggcatttctggttggcaccctgacctatcgtagccagaccaataccctggcaattattgaaagcggtggtggtattctgcgtaatgttagcagcctgattgcaaccaacgaagatcatcgtcagattctgcgtgaaaataattgtctgcagaccctgctgcagcatctgaaaagccatagcctgaccattgttagcaatgcatgtggcaccctgtggaacctgtctgcacgtaatccgaaagatcaagaggcactgtgggatatgggtgcagttagcatgctgaaaaacctgatccacagcaaacataaaatgattgcaatgggtagcgcagcagcactgcgcaatctgatggcaaatcgtccggcaaaatataaagatgccaacattatgtctccgggtagcagcctgccgagcctgcatgttcgtaaacagaaagcactggaagcagaactggatgcacagcatctgagcgaaacctttgataacattgacaatctgagcccgaaagcaagccatcgtagcaaacagcgtcataaacagagcctgtatggcgattatgtttttgataccaaccgccatgatgataatcgcagcgataattttaataccggcaatatgaccgttctgagcccgtatctgaataccaccgttctgccgagcagcagctctagccgtggttctctggatagctctcgtagcgaaaaagatcgttctctggaacgtgaacgtggtattggtctgggtaattatcatccggcaaccgaaaatccgggtacaagcagcaaacgtggtctgcagattagcaccaccgcagcacagattgcaaaagttatggaagaagtgagcgcaattcataccagccaggaagatcgtagcagcggttctaccaccgaactgcattgtgttaccgatgaacgtaatgcactgcgtcgtagcagcgcagcacatacccatagcaacacctataacttcaccaaaagcgaaaattctaatcgtacctgtagcatgccgtatgccaaactggaatataaacgtagcagctaagcggccgcttaattaa

SEQ ID NO: 19 - DNA, 913 bp, Homo sapiens
ccttttaagagggagaattaactatgagaggtcgcatcaccatcaccatcacggatcctatttaggtgacactatagaatcgtcgacccacgcgtccggcgccggctccagggccatgaagcccccaggaggagaatcgagcaatctttttggaagtccagaagaagctactccttccagcaggcctaataggatggcatctaatatttttggaccaacagaagaacctcagaacatacccaagaggacaaatcccccagggggtaaaggaagtggtatctttgacgaatcaacccccgtgcagactcgacagcacctgaacccacctggagggaagaccagcgacatttttgggtctccggtcactgccacttcacgcttggcacacccaaacaaacccaaggatcatgttttcttatgtgaaggagaagaaccaaaatcggatcttaaagctgcaaggagcatcccggctggagcagagccaggtgagaaaggcagcgccagaaaagcaggccccgccaaggagcaggagcccatgcccacagtcgacagccatgagccccggctggggccgcggcctcgctctcacaacaaggtcctgaacccaccgggaggcaaatccagcatctccttctactaagagaagccactgctccacccggagccagaccagaaactcaagagatagggtagccatgttttcatttccttttgcccaaatgagcggggtgggaagagggttagtcttatgtgagcctggctgctcagcgtctcctggccgtcatgacagctgcttggagacccgtgccttccagatggctgggagatgcctctgtggggatgaaatggggcacccctggccatcactcatgtgtagtccaggtttgagaggaactggaaggggggtgagggt

SEQ ID NO: 20 - DNA, 859 bp, Homo sapiens
ctatgagaggatcgcatcaccatcaccatcacggatcctatttaggtgacactatagaatcgtcgacccacgcgtccgcccacgcgtccggcgactcaccatcgtcagtgcgcaaccgttcgctaactgaaatgatggcgactggaacgccagagtctcaagcgcggttcggtcagtccgtgaaggggcttctcacggagaaggtgaccacctgtggtactgacgtaatcgcgctcaccaagcaggtgctgaaaggctcccggagctccgagctgctaggtcaggcagctcgaaacatggtactccaggaagatgccatcttgcactcagaagatagtttaaggaagatggcaataataacaacacatcttcaataccagcaagaagctattcagaagaatgttgaacagtcatcggatctacaggaccagttgaatcatctgttgaaatagaatgacatgtaagagtgctgtaggactcctttgcctaatgctgaggagtaaataccttacacagctgtcctctgggtttggttttctattttcttctccaaaagttaagttagaaaagttctgtgttagggtcgggcgcggtagctcacgcctgtaatcccagcactttgggaggccgaggcgggtggatcacgaggtcaggagttcgagaccagcctggccaagatggtgaaaccccgtctctactaaaaatacaaagaattagctgggcgtggtggcgggcgcctgtaatcccagctactcgggaagctgaggcaagagaatcgcttgaacccaggaggtggaggttgcagtgagccaagatcgcgccactgcactccagcctggcgacagagtgagattccatc

SEQ ID NO: 21 - DNA, 1239 bp, Homo sapiens
ggtaccgtcgaccatgcgtcgttttaaacgtaaacatctgaccgcaattgattgtcagcatctggcacgtagccatctggcagttacccagccgtttggtcagcgttggaccaatcgtgatccgaatcatggtctgtatccgaaaccgcgtaccaaacgtggtagccgtggtcagggtagccagcgttgtattccggaattttttctggcaggtaaacagccgtgtaccaatgatatggccaaaagcaatagcgttggtcaggatagctgtcaggatagcgaaggtgatatgatttttccggcagaaagcagctgtgcactgccgcaggaaggtagcgcaggtccgggttctccgggtagcgcaccgcctagccgtaaacgtagctggtctagcgaagaagaaagcaatcaggcaaccggcaccagccgttgggatggtgttagcaaaaaagcaccgcgtcatcatctgagcgttccgtgtacccgtccgcgtgaagcacgtcaggaagcagaagatagcaccagccgtctgagcgcagaaagcggtgaaaccgatcaggatgccggtgatgttggtcctgatccgattccggatagctattatggtctgctgggcaccctgccgtgtcaggaagcactgagccatatttgtagcctgccgagcgaagttctgcgtcatgtttttgcatttctgccggttgaagatctgtattggaatctgagcctggtttgtcatctgtggcgtgaaattattagcgatccgctgtttattccgtggaaaaaactgtatcaccgctatctgatgaatgaagaacaggccgttagcaaagttgatggtattctgagcaattgcggcattgaaaaagaaagcgatctgtgcgttctgaatctgattcgttataccgcaaccaccaaatgtagcccgagcgttgatccggaacgtgttctgtggagcctgcgtgatcatccgctgctgccggaagcagaagcatgcgttcgtcagcatctgccggatctgtatgcagcagccggtggtgttaatatttgggcactggttgcagcagttgttctgctgagcagcagcgttaatgatattcagcgtctgctgttttgtctgcgtcgtccgagcagcaccgttaccatgccggatgttaccgaaaccctgtattgtattgcagttctgctgtatgcaatgcgcgaaaaaggcattaatatcagcaactaagcggccgcgagctc

SEQ ID NO: 22 - DNA, 1237 bp, Homo sapiens
tttttaaagaagaagaattaactatgagaggatcgcatcaccatcaccatcacggatcctatttaggtgacactatagaatcgtcgacccacgcgtccgtgtcggatggacttggggctagctgcggcggggctggaggaggccagataaccatgtcagccacagttgtagatgcagttaatgctgcacccctatcggggtccaaagaaatgagtttggaagaaccaaagaagatgaccagagaggactggagaaagaagaaggagctagaagaacagcgaaaattgggcaatgctcctgcagaagttgatgaagaaggaaaagacatcaacccccatattcctcagtatatttcttcagtgccatggtatattgatccttcaaaaagacctactttaaaacaccagagaccacaaccagaaaaacaaaagcagttcagctcatctggagaatggtacaagaggggtgtaaaagagaattccataattactaagtaccgcaaaggagcatgtgaaaattgtggggccatgacacacaaaaagaaagactgctttgagagacctaggcgagttggagccaaatttacaggtactaatatagctccagatgaacatgtccagcctcaactgatgtttgactatgatgggaagagggatcggtggaatggctacaatccagaagaacacatgaaaattgttgaagagtatgccaaagttgatttggcaaaacgaacattgaaagcccagaaactccaagaggaattagcctcaggaaaattagtggaacaggctaattctccaaaacaccagtggggagaagaggaaccaaattctcagatggaaaaagatcataatagtgaagatgaggatgaagataaatatgcagatgatattgacatgcctggacagaattttgactccagagacgaattactgtccggaatctcaggattcgagagatattgcaaaatatttgaggaatttagatccaaattctgcctactatgatccaaaaactagagcatgagagagaatccttatgccaatgcagaagattcagatgatgagttatgctggaatatactttgtagtaccagaaatacattcattgctcaaccaggttgtttgcatgtagctatgcaagggatctgaatgtcatctcagccgatctacagctaggctgtgtgttagtctcaagtctaaagatccagactctaagaagtcttgtaagttgggtc

SEQ ID NO: 23 - DNA, 1909 bp, Homo sapiens
ggcgcgccgtcgaccgttgattatagcgcactggaaaaagaagtggattttgatagcgatccgatggaagaatgcctgcgcatttttaatgaaagcaccagcgttaaaaccgaagatcgtggtcgtctggcacgtcagcctccgaaagaagaaaaatccgaagaaaaaggtctgagcggtctgaccaccctgtttccgggtcagaaacgtcgtattagccatctgagcaaacagggtcaggaagttgaaccgcctcgtcgtggtccggcagttccgcctgcacgtccgcctaccgcacaagaggtttgttatctgcgtgcacagcaggcacagcgtgcaagcgcaagcctgctgcaagcaccggcacgtctggcagaaaaaagcccgagcgttcatattagcgcaccgggtgaaaaacgtcgcattgcacatattccgaatccgcgtctggcagcagcaccgaccggtgcaaaacgtaccctggcagcaagcggtagccagagcagcaatggtccggaacctggtggtcaacagctgaaaacccgtaccctgagcggtatggcaagcaaaaccaccaccaccattattccgaaacgtattgcacatagcccgagcctgcagagcctgaaaaaaccgatcattccgaaagaatttggtggtaaagttccgaccgttattcgtcagcgttatctgaacctgtttattgaagagtgcctgaaattttgtaccagcaaccaggaagcaattgaaaaagccctgaacgaagaaaaagttgcatatgatcgcagcccgagcaaaaacatttatctgaacgtggccgtgaataccctgaaaaaactgcgtggtctggcaccgtctgcagttccgggtctgagcaaaaccagcggtcgtcgtgttgttagccatgaagttgttctgggtggacgcctggcagcaaaaaccagctttagcctgagccgtccgagcagtccgcgtgttgaagatctgaaaggtgcagcactgtatagccgtctgcgtgaatatctgctgacccaggatcagctgaaagaaaatggttatccgtttccgcatccggaacgtccgggtggtgcaattatttttaccgcagaagagaaacgtccgaaagatagcagctgtcgtacctgttgtcgttgtggcaccgaatatctggttagcagcagcggtcgttgtattcgtgatgaagagtgctattatcattggggtcgtctgcgtcgtaatcgtgttgccggtggttgggaaacccagtatatgtgttgtagcgcagcagcaggtagcgttggttgtcaggttgcaaaacagcatgttcaggatggtcgtaaagaacgtctggaaggctttgtgaaaacctttgaaaaagaactgagcggtgatacccatccgggtatttatgcactggattgcgaaatgagctataccacctatggtctggaactgacccgtgttaccgttgttgataccgatgttcatgtggtgtatgatacctttgtgaaaccggataacgaaatcgttgattacaatacccgttttagcggtgttaccgaagcagatctggcagataccagcgttaccctgcgtgatgttcaggcagttctgctgagcatgtttagcgcagataccattctgattggtcatagcctggaaagcgatctgctggcactgaaagttattcatagcaccgttgtggataccagcgtgctgtttccgcatcgtctgggtctgccgtataaacgtagcctgcgtaatctgatggcagattatctgcgtcagattatccaggataatgttgatggtcattcttcaagcgaagatgccggtgcatgtatgcatctggttatttggaaagtgcgtgaggatgcaaaaaccaaacgctaagcggccgcttaattaa

SEQ ID NO: 24 - DNA, 975 bp, Homo sapiens
atgagaggatcgcatcaccatcaccatcacggatcctatttaggtgacactatagaatcgtcgaccatgagacgcgcccacgcgtccgcccagcaacacgctcctgacttcccttcccaaggactcgacctgagaaccgccatgtactcggagatccagagggagcgggcagacattgggggcctgatggcccggccagaatacagagagtggaatccggagctcatcaagcccaagaagctgctgaaccccgtgaaggcctctcggagtcaccaggagctccaccgggagctgctcatgaaccacagaaggggccttggtgtggacagcaagccagagctgcagcgtgtcctagagcaccgccggcggaaccagctcatcaagaagaagaaggaggagctggaagccaagcggctgcagtgcccctttgagcaggagctgctgagacggcagcagaggctgaaccagctggaaaaaccaccagagaaggaagaggatcacgcccccgagtttattaaagtcagggaaaacctgcggagaattgccacactgaccagcgaagagagagagctgtagggccagctgccgggctcaggccactgcccaccctggcctggacagcctccttcagcccttctgtacctggcagccctgggccccaggccctgggacgtctgtgatgttcccacctgcttctgtagaaatgtgtcaccccagagggcctggctctccctgggaggctggggcccctaagctcctaggttttccttccaagcacccagccctcctgctccaagagggataacctgcacccctccctgcaaggggttcagagcccagcacaggagctttctctggcagaattgaggaggaagaggtggccctctgacttgacaagccttctgttctgcccaggccttcccaccaggaatctccgaggctccccagggccccgcttctccgtacaccccagct

SEQ ID NO: 25 - DNA, 1388 bp, Homo sapiens
ctaagaatactagagaggatgcatcaccatcaccatcacggtcgaccccgcgtccggcgcggcctcccgggcgggcctacagccatgtcccgggacccggggtcgggcggctgggaggaggccccgcgcgcagctgccgcgctctgcaccctgtaccacgaggccggacagcggctgcgccgcctgcaggaccagctcgctgcccgcgacgccctcatcgctcgcctccgcgcccgcctggccgcgctggagggggacgccgcgccgtccctagtggacgcgctgctggagcaggttgcgcgcttccgggagcagctgcgaaggcaggagggcggcgccgccgaggcccagatgcgccaggaaattgagaggctgactgagcgactagaagaaaaagagagggagatgcagcagctgctgagccagccccaacacgagcgagagaaggaagtcgtcctgctacggaggagcatggcagaaggggagcgcgcccgggccgccagtgacgtcctgtgccgctccttggccaacgagacccatcagctgcggacgatgctgaccgccaacgcccactgagtcagtacccgtcaactgcagcatcaaactcgccatgccacaggcatgtcgactacaaatccccgccaaaacacccacatatacgccacaccgatgcaacattacaaagagaaatcgaccaaacttactactcctaatccaaatcctattcttattaaaaaaaccaacataccttaaacaaatcacccacgccaaacaaaactttcacctactttccgccaacaacaccataatatctcctcccaacacaaataatcagaaagtaattaaaaacaaaacaaattctcaaaaactaacatcataataatccctctaactcccaacatcataaaaatacccacaacctactaacatacacactcccaaaactttccacaacccatatcttccaatcccaacccatactaaaacaataccatttataaacaacaaacacacatatacaacatccaccaccccacacaattatatcaaatcaataaaacaactccaatacttaaaagcatataaaataactaaatacctctatacaacgatcacacccttcaaataaaactcatcaacccacctactataataccccatactcaatacccttattgacaattctcatatcaataatccactctccacaacacaaactccatatcataaacccctattcaatcacatttccatatacctaacctctacactacacatccccccaaccaccataccttctcctcacccaaattaaacctcccccccactacgacgcatatactctaaatcatcccccctccaaccataaccctaccaacaatacaaca

SEQ ID NO: 26 - DNA, 897 bp, Homo sapiens
ggtaccgtcgaccatggcaggcgcaggtcgtggtgcagcagttagccgtgttcaggcaggtccgggttctcctcgtcgtgcacgtggtcgtcagcaggttcagccgctgggtaaacagcgtccggcaccgtggcctggtctgcgtagcaaagaaaaaaaaaaagtgaattgcaaaccgaaaaaccaggatgaacaggaaattccgtttcgtctgcgtgaaattatgcgtagccgtcaggaaatgaaaaacccgatcagcaataaaaaacgcaaaaaagcagcacaggttacctttcgtaaaaccctggaaaaagaagcaaaaggcgaagaaccggatattgccgttccgaaatttaaacagcgcaaaggtgaatctgatggtgcctatattcatcgtatgcagcaggaagcacagcacgttctgtttctgagcaaaaatcaggcaattcgtcagccggaagttcaggcagcaccgaaagaaaaaagcgaacagaaaaaagccaaaaaagcgtttcagaaacgtcgtctggataaagttcgtcgcaaaaaagaagaaaaagcagcagatcgtctggaacaggaactgctgcgcgataccgttaaatttggtgaagttgttctgcagcctccggaactgacagcacgtccgcagcgtagcgttagcaaagatcagcctggtcgtcgtagccagatgctgcgtatgctgctgtctccgggtggtgttagccagccgctgaccgcatctctggcacgtcagcgtattgttgaagaagaacgcgaacgcgcagttcaggcatatcgtgcactgaaacagcgtcagcagcagctgcatggtgaacgtccgcatctgaccagccgtaaaaaaccggaaccgcagctgtaagcggccgcgagctc

SEQ ID NO: 27 - DNA, 642 bp, Homo sapiens
  misc_feature (37)..(37): n is a, c, g, or t
tcgagaaatataaaaattatttgctttgtgagcgganacaatataatagattaattgtgagcggataacaatttacacagaattattaaagaggagaaattaactatgagaggatcgcatcaccatcaccatcacggatcctatttaggtgacactatagaatcgtcgacccacgcgtccgactggttcctgggccaggcaggcagctccatcccatcaacttggccccggttctatgacacccgctacaaccaagagacaccaatggagatctgcctcaatggaacccctgctctggcctacctggcgagtgcgcccccacccctgtgtccaagtggccgcactccagacctgaaggctctactcaacgtggtggacaatgcccggagtttcatctacgtcgctgtcatgaactacctgcccactctggagttctcccaccctcacaggttctggcctgccattgacgatgggctgcggcgggccacctacgagcgtggcgtcaaggtgcgcctgctcatcagctgctggggacactcggagccatccatgcgggccttcctgctctctctggctgccctgcgtgacaaccatacccactctgacatccaggtgaaactctttgtggtccccgcggatgag

SEQ ID NO: 28 - DNA, 930 bp, Homo sapiens
catcaccatcaccatcacggatcctatttaggtgacactatagaatcgtcgacccacgcgtccgcgatccctcaacccctgcactgcgctagtcctaaagaggaaatgtctctacgctgcggggatgcagcccgcaccctggggccccgggtatttgggagatatttttgcagcccagtcagaccgttaagctccttgccagataaaaaaaaggaactcctacagaatggaccagaccttcaagattttgtatctggtgatcttgcagacaggagcacctgggatgaatataaaggaaacctaaaacgccagaaaggagaaaggttaagactacctccatggctaaagacagagattcccatggggaaaaattacaataaactgaaaaatactttgcggaatttaaatctccatacagtatgtgaggaagctcgatgtcccaatattggagagtgttggggaggtggagaatatgccgccacagccacgatcatgttgatgggtgacacatgtacaagaggttgcagattttgttctgttaagactgcaagaaatcctcctccactggatgccagtgagccctacaatactgcaaaggcaattgcagaatggggtctggattatgttgtcctgacatctgtggatcgagatgatatgcctgatgggggagctgaacacattgcaaagaccgtatcatatttaaaggaaaggaatccaaaaatccttgtggagtgtcttactcctgattttcgaggtgatctcaaagcaatagaaaaagttgctctgtcaggattagatgtgtatgcacataatgtagaaacagtcccggaattacagagtaaggttcgtgatcctcgggccaattttgatcagtccctacgtgtactgaaacatgccaagaaggttcagcctgatgttatttctaaaaca

SEQ ID NO: 29 - DNA, 983 bp, Homo sapiens
  misc_feature (1)..(1): n is a, c, g, or t
  misc_feature (952)..(952): n is a, c, g, or t
  misc_feature (961)..(983): n is a, c, g, or t
nattagagaaattactatgagaggatcgcatcaccatcaccatcacggatcctatttaggtgacactatagaatcgtcgacccacgcgtccgagatgccgaaaggaaagaaggccaagggaaagaaggtggctccggccccagctgtcgtgaagaagcaggaggctaagaaagtggtgaatcccctgtttgagaaaaggcctaagaattttggcattggacaggacatccagcccaaaagagacctcacccgctttgtgaaatggccccgctatatcaggttgcagcggcagagagccatcctctataagcggctgaaagtgcctcctgcgattaaccagttcacccaggccctggaccgccaaacagctactcagctgcttaagctggcccacaagtacagaccagagacaaagcaagagaagaagcagagactgttggcccgggccgagaagaaggctgctggcaaaggggacgtcccaacgaagagaccacctgtccttcgagcaggagttaacaccgtcaccaccttggtggagaacaagaaagctcagctggtggtgattgcacacgacgtggatcccatcgagctggttgtcttcttgcctgccctgtgtcgtaaaatgggggtcccttactgcattatcaagggaaaggcaagactgggacgtctagtccacaggaagacctgcaccactgtcgccttcacacaggtgaactcggaagacaaaggcgctttggctaagctggtggaagctatcaggaccaattacaatgacagatacgatgagatccgccgtcactggggtggcaatgtcctgggtcctaagtctgtggctcgtatcgccaagctcgaaaaggcaaaggctaaagaacttgccactaaactgggttaaatgtacactgttgagttttctgtacataaaaataattgaaataatacaaatttttcnttcaaaaannnnnnnnnnnnnnnnnnnnnnn

SEQ ID NO: 30 - DNA, 939 bp, Homo sapiens
tccttttaaggaaaggagaaattaactatgagaggtcgcatcaccatcaccatcacggatcctatttaggtgacactatagaatcgtcgacccacgcgtccggctccgggaatgagccggtgccatctgtgggggctttgggccaggggtctccggacagcatgagcgtgggcttcatcggcgctggccagctggcttttgccctggccaagggcttcacagcagcaggcgtcttggctgcccacaagataatggctagctccccagacatggacctggccacagtttctgctctcaggaagatgggggtgaagttgacaccccacaacaaggagacggtgcagcacagtgatgtgctcttcctggctgtgaagccacacatcatccccttcatcctggatgaaataggcgccgacattgaggacagacacattgtggtgtcctgcgcggccggcgtcaccatcagctccattgagaagaagctgtcagcgtttcggccagcccccagggtcatccgctgcatgaccaacactccagtcgtggtgcgggagggggccaccgtgtatgccacaggcacgcacgcccaggtggaggacgggaggctcatggagcagctgctgagcagcgtgggcttctgcacggaggtggaagaggacctgattgatgccgtcacggggctcagtggcagcggccccgcctacgcattcacagccctggatgccctggctgatgggggtgtgaagatgggacttccaaggcgcctggcagtccgcctcggggcccaggccctcctgggggctgccaagatgctgctgcactcagaacagcacccaaggccagctcaaggacaacgtcagcttctcctggtggggccaccatccatgccttgcatgtgctggagagtggggctttcctctcccctgcttatcaacgctgagg

SEQ ID NO: 31 - DNA, 1084 bp, Homo sapiens
aattttaggaggagaatttaactatgagaggtcgcatcaccatcaccatcacggatcctatttaggtgacactatagaatcgtcgacccacgcgtccgcccggcccagcttcttctccatctccccgcaggactgccagtttgctttggggggccggggtcagaagccagagctgcagatgctcactgtgtcggaggagctgccgtttgacaacgtggatggtggtgtgtggaggcaaggcttcgacatctcctacgacccgcacgactgggatgctgaagacctgcaggtgtttgtggtgccccactctcacaatgacccaggctggatcattacctttgacaagtactacacagagcagacccaacacatcctcaatagcatggtgtctaagctgcaggaggacccccggcggcgcttcctctgggcagaggtctccttcttcgccaagtggtgggacaacatcaatgtccaaaagagagcggcagtccgaaggctggtgggaaacgggcagctggagattgcgacaggaggctgggtgatgccagatgaggccaattcccactactttgcattgattgaccagctcatcgaaggacaccagtggctggagagaaatcttggtgcaaccccccgctctggctgggcagtggacccctttggatacagctccaccatgccttacctgctgcgccgtgccaacctcaccagcatgctgattcagagagtgcactatgccatcaagaagcactttgctgccacccacagcctagagttcatgtggaggcagacatgggactcggactccagcacagacatcttctgtcacatgatgcccttctacagctatgacgtcccccatacctgtggcccagatcccaagatctgctgccaatttgatttcaaacgcctgcctggtgggcgcatcaactgcccttggaaggtgccacccgggccatcacagaggccaccgtggcagagaggcagccctgcttctggaccataccagaagagtctcggctgttccgagcacgttctctgtgcctcctgaaatgactcgaattgacagcccagagtgggtatg

SEQ ID NO: 32 - DNA, 978 bp, Homo sapiens
atgagaggtcgcatcaccatcaccatcacggatcctatttaggtgacactatagaatcgtcgacccacgcgtccgcttcgcggctgctcaagatgaaccgactcttcgggaaagcgaaacccaaggctccgccgcccagcctgactgactgcattggcacggtggacagtagagcagaatccattgacaagaagatttctcgattggatgctgagctagtgaagtataaggatcagatcaagaagatgagagagggtcctgcaaagaatatggtcaagcagaaagccttgcgagttttaaagcaaaagaggatgtatgagcagcagcgggacaatcttgcccaacagtcattcaacatggaacaagccaattataccatccagtctttgaaggacaccaagaccacggttgatgctatgaaactgggagtaaaggaaatgaagaaggcatacaagcaagtgaagatcgaccagattgaggatttacaagaccagctagaggatatgatggaagatgcaaatgaaatccaagaagcactgagtcgcagttatggcaccccagaactggatgaagatgatttagaagcagagttggatgcactaggtgatgagcttctggctgatgaagacagttcttatttggatgaggcagcatctgcacctgcaattccagaaggtgttcccactgatacaaaaaacaaggatggagttctggtggatgaatttggattgccacagatccctgcttcatagatttgcatcattcaagcatatcttgtaaaacaaacacatattatgggactaggaaatatttatctttccaaatttgccataacagatttaggtttctttcctttctttgaaggaaagtttaattacattgctcttttattttttccattaagagactcattgcttgggaaatgctttcttcgtactaaaatttgattccctttttttcttatgaaaaacgaactca

SEQ ID NO: 33 - DNA, 889 bp, Homo sapiens
tgagaggatcgcatcaccatcaccatcacggatcctatttaggtgacactatagaatcgtcgacccacgcgtccgcccacgcgtccgagcaccgccccctggacgagcgggccctgcaggagaagctgaagtactttcccgtgtgcgtgagcaccaagccggagcccgaggacgatgcagaagagggacttgggggtcttcccagcaacatcagctctgtcagctccttgctgctcttcaacaccactgagaacctgtacaagaagtatgtcttcctggaccccctggctggtgctgtaacaaagacccatgtgatgctgggggcagagacagaggagaagctgtttgatgcccccttgtccatcagcaagagagagcagctggaacagcaggtcccagagaactacttctatgtgccagacctgggccaggtgcctgagattgatgttccgtcctacctgcctgacctgcccggcattgccaacgacctcatgtacagtgccgacctgggccccggcattgccccctctgcccctggcaccattccggaactgcccaccttccacactgaggtagccgagccactcaaggcagacctacaagatggggtactaacagcaccaccaccacccccaccgcccccaccacctcccccagctcctgaggtgctggccagtgcatccccactcccaccctcaaccgcggcccctgtaggccaaggcgccaggcaggacgacggcagcagcagcgcgtctccttcagtccagggagctcccagggaagtggtcgacccctccggtggccgggccactctgctagagtccatccgccaagctgggggcatcggcaaggccaagctgcgcagcgtgaaggagcgaaagctggagaa

SEQ ID NO: 34 - DNA, 863 bp, Homo sapiens
taactatgagaggtcgcatcaccatcaccatcacggatcctatttaggtgacactatagaatcgtcgacccacgcgtccggcgcagaggagggagcaattgaatttcaaacacaaacaactgcacgagcgcgcacccaccgcgccggagccttgccccgatccgcgcccgccccgtccgtgcggcgcgcgggcggagacgccgtggccgcgccggagctcgggccgggggccaccatcgaggcgggggccgcgcgagggccggagcggagcggcgccgccaccgccgcacgcgcaaacttgggctcgcgcttcccggcccggcgcggagcccggggcgcccggagccccgccatgtcgcgatccaaccggcagaaggagtacaaatgcggggacctggtgttcgccaagatgaagggctacccacactggccggcccggattgacgagatgcctgaggctgccgtgaaatcaacagccaacaaataccaagtcttttttttcgggacccacgagacggcattcctgggccccaaagacctcttcccttacgaggaatccaaggagaagtttggcaagcccaacaagaggaaagggttcagcgaggggctgtgggagatcgagaacaaccctactgtcaaggcttccggctatcagtcctcccagaaaaagagctgtgtggaagagcctgaaccagagcccgaagctgcagagggtgacggtgataagaaggggaatgcagagggcagcagcgacgaggaagggaagctggtcattgatgagccagccaaggagaagaacgagaaaggagcgttgaagaggagagcagggacttgctgggaggactctcctaaacgtcccagga

SEQ ID NO: 35 - DNA, 885 bp, Homo sapiens
ctttttaaagaggagaattaactatgagaggtcgcatcaccatcaccatcacggatcctatttaggtgacactatagaatcgtcgacccacgcgtccgggaagctgttcggggctggagggggtaaggccggcaagggcggcccgaccccccaggaggccatccagcggctgcgggacacggaagagatgttaagcaagaaacaggagttcctggagaagaaaatcgagcaggagctgacggccgccaagaagcacggcaccaaaaacaagcgcgcggccctccaggcactgaagcgtaagaagaggtatgagaagcagctggcgcagatcgacggcacattatcaaccatcgagttccagcgggaggccctggagaatgccaacaccaacaccgaggtgctcaagaacatgggctatgccgccaaggccatgaaggcggcccatgacaacatggacatcgataaagttgatgagttaatgcaggacattgctgaccagcaagaacttgcagaggagatttcaacagcaatttcgaaacctgtagggtttggagaagagtttgacgaggatgagctcatggcggaattagaagaactagaacaggaggaactagacaagaatttgctggaaatcagtggacccgaaacagtccctctaccaaatgttccctctatagccctaccatcaaaacccgccaagaagaaagaaagaggaggacgacgacatgaaggaatttggagaactgggctggatccatgtaatggggtccagcgctggctgggcccagacagactgtggtggcctgcgcagcgagcagcgtgtgcgtgtgtgtggcaggcaggatgtgtgcaagacagttccatcgttaccactctactcgaagc

SEQ ID NO: 36 - DNA, 809 bp, Homo sapiens
  misc_feature (1)..(1): n is a, c, g, or t
  misc_feature (627)..(627): n is a, c, g, or t
  misc_feature (686)..(686): n is a, c, g, or t
  misc_feature (720)..(720): n is a, c, g, or t
  misc_feature (798)..(798): n is a, c, g, or t
  misc_feature (809)..(809): n is a, c, g, or t
naactatgagaggatcgcatcaccatcaccatcacggatcctatttaggtgacactatagaatcgtcgacccacgcgtccgcggacgcgtgggcggacgcgtgggcggacgcgtgggccgcctccgagcccgccgccacatcctctgagcagaagatggctgtgccacccacgtatgccgatcttggcaaatctgccagggatgtcttcaccaagggctatggatttggcttaataaagcttgatttgaaaacaaaatctgagaatggattggaatttacaagctcaggctcagccaacactgagaccaccaaagtgacgggcagtctggaaaccaagtacagatggactgagtacggcctgacgtttacagagaaatggaataccgacaatacactaggcaccgagattactgtggaagatcagcttgcacgtggactgaagctgaccttcgattcatccttctcacctaacactgggaaaaaaaatgctaaaatcaagacagggtacaagcgggagcacattaacctgggctgcgacatggatttcgacattgctgggccttccatccggggtgctctggtgctaggttacgagggctggctggccggctaccagatgaattttngagactgcaaaatcccgagtgacccagagcaactttgcagttggctacaagactgatgnatttccagcttcacactaatgtgaatgacggganagagtttggcggctccttttaccagaaagtgaacaagaagttggagaccgctgtcaatcttgcctgaaagcaggaaanagtaacacgcn

SEQ ID NO: 37 - DNA, 944 bp, Homo sapiens
cattttaagaaggagaaattaactatgagaggtcgcatcaccatcaccatcacggatcctatttaggtgacactatagaatcgtcgacccacgcgtccggtgaactcaagcgcaattttatggaatccacacctgagccgccccctagtgaatgggaaaaacgacgtatcacacctctgtccctacagactgagggacacgtgctcccgactccgaaggcccttggactggaaccggggatgcggttaacccaccaatggaaaaaacagagatggtaacaatttctgatgcctcacaaaggacagaaatctccaccaaagaagtccccattgacccaactgacacccaaaccatcacatatgagtctccacagattgatggcggggctggtggtgattcgggcacgttactgaccgcacaaaccatcacatctgattccgtgtcaacaacgacaaccacacacatcaccaagactgtaaaaggtggaatttctgaaacaagaattgataaacgcattgtgatcacaggagatggagatattgatcatgaccaggcactggctcaggcgatcagggaagccagagagcagcaccctgacatgtcggtcacaagagtggtggtacacaaagaaacagagttggctgaggaaggggaagattaagtaagaaagtcattttttaaacaacactcaactttgtgaacccctgaagattttttgaccgttccaagtcttaatgccacaccactattccagcgaatttatgctacaactggtaacaatgaccagaagcctgaagaattaaaatgccaacaccaaacctttccttaccagctctggtctatattgctcccatgcatttaatatattattttgttttataaccacttctaaatattctcagttctttctttttgttgttgttaattaaggggttttggttttg

SEQ ID NO: 38 - DNA, 482 bp, Homo sapiens
atttttaaagaagagaattaactatgagaggtcgcatcaccatcaccatcacggatcctatttaggtgacactatagaatcgtcgacccacgcgtccgcctggatgagcaggagctggaggcactcttcaccaaggagctggagaaagtgtacgacccaaagaatgaggaggacgacatgcgggagatggaggaggagcgactgcgcatgcgggagcatgtgatgaagaatgtggacaccaaccaggaccgcctcgtgaccctggaggagttcctcgcatccactcagaggaaggagtttggggacaccggggagggctgggagacagtggagatgcaccctgcctacaccgaggaagagctgaggcgctttgaagaggagctggctgcccgggaggcagagctgaatgccaaggcccagcgcctcagccaggagacagaggctctagggcggtcccagggccgcctggaggcccataagat

SEQ ID NO: 39 - DNA, 1089 bp, Homo sapiens
  misc_feature (806)..(806): n is a, c, g, or t
  misc_feature (905)..(905): n is a, c, g, or t
  misc_feature (916)..(916): n is a, c, g, or t
  misc_feature (925)..(925): n is a, c, g, or t
  misc_feature (928)..(929): n is a, c, g, or t
  misc_feature (961)..(961): n is a, c, g, or t
  misc_feature (973)..(973): n is a, c, g, or t
  misc_feature (1005)..(1005): n is a, c, g, or t
  misc_feature (1007)..(1007): n is a, c, g, or t
  misc_feature (1011)..(1011): n is a, c, g, or t
  misc_feature (1014)..(1014): n is a, c, g, or t
  misc_feature (1017)..(1017): n is a, c, g, or t
  misc_feature (1023)..(1023): n is a, c, g, or t
  misc_feature (1037)..(1037): n is a, c, g, or t
  misc_feature (1040)..(1040): n is a, c, g, or t
  misc_feature (1043)..(1043): n is a, c, g, or t
  misc_feature (1047)..(1048): n is a, c, g, or t
  misc_feature (1055)..(1056): n is a, c, g, or t
  misc_feature (1059)..(1059): n is a, c, g, or t
  misc_feature (1087)..(1088): n is a, c, g, or t
agagaaattactatgagaggatcgcatcaccatcaccatcacggatcctatttaggtgacactatagaatcgtcgacccacgcgtccgcgctccgaggtccccgcgccagagacgcagccgcgctcccaccacccacacccaccgcgccctcgttcgcctcttctccgggagccagtccgcgccaccgccgccgcccaggccatcgccaccctccgcagccatgtccaccaggtccgtgtcctcgtcctcctaccgcaggatgttcggcggcccgggcaccgcgagccggccgagctccagccggagctacgtgactacgtccacccgcacctacagcctgggcagcgcgctgcgccccagcaccagccgcagcctctacgcctcgtccccgggcggcgtgtatgccacgcgctcctctgccgtgcgcctgcggagcagcgtgcccggggtgcggctcctgcaggactcggtggacttctcgctggccgacgccatcaacaccgagttcaagaacacccgcaccaacgagaaggtggagctgcaggagctgaatgaccgcttcgccaactacatcgacaaggtgcgcttcctggagcagcagaataagatcctgctggccgagctcgagcagctcaagggccaaggcaagtcgcgcctgggggacctctacgaggaggagatgcgggagctgcgccggcaggtggaccagctaaccaacgacaaagcccgcgtcgaggtggagcgcgacaacctggccgaggacatcatgcgcctccgggagaaattgcaggaggagatgcttcanagagaggaagccgaaaacaccctgcaatctttcagacaggatgttgacaatgcgtctctggcacgtcttgaccttgaacgcaaagtggaatctttgcanaagagattgcntttttgaanaanntccacgaaaagaaatccaggagctgcaggctnaaattcaggaanagcatgtccaaatcgatgtggatgtttccaancntganctnaanggttgncctgggtgaagtangtnaanaatnngaaagtnnggntgcaaaaaacttgcaggaagcaaaaaanng

SEQ ID NO: 40 - DNA, 752 bp, Homo sapiens
ctatgagaggatcgcatcaccatcaccatcacggatcctatttaggtgacactatagaatcgtcgacccacgcgtccgcccacgcgtccgggcgaagtgcgcgcgcgattgctccgggctctgcgcctggtgcggcggctgcgcggcctgagccaggccctgcgcgaggccgaagccgacggcgcggcctgggtcctgctgtactcccagaccgcgccgctgcgcgcggaactggccgagcggctacagccgttgacccaggctgcctatgtgggcgaggcgcggaggaggctggagagggtccggcgccgccggctgcggcttcgcgagagggcccgggaacgcgaggccgagcgggaggcagaggccgcgcgggcagtggaacgcgagcaggagattgaccgctggagggtgaagtgtgtgcaggaggtggaggagaagaagcgggagcaggaactcaaagcagccgctgatggcgtactatctgaagtgaggaaaaaacaagcagataccaaaagaatggtggacattctacgggctttggagaaattgaggaaactgaggaaagaggctgcagcgaggaaaggggtctgtcctccagcctcagcagatgagacttttacgcatcatcttcagcgactgagaaaactcattaaaaagcgctctgaactgtatgaagctgaagagagagccctcagagttatgctagaaggagaacaagaggaagagaggaaaagagaattagaaaagaa

SEQ ID NO: 41 - DNA, 944 bp, Homo sapiens; identical to SEQ ID NO: 37

SEQ ID NO: 42 - DNA, 482 bp, Homo sapiens; identical to SEQ ID NO: 38

SEQ ID NO: 43 - DNA, 1089 bp, Homo sapiens; identical to SEQ ID NO: 39
  misc_feature (806)..(806): n is a, c, g, or t
  misc_feature (905)..(905): n is a, c, g, or t
  misc_feature (916)..(916): n is a, c, g, or t
  misc_feature (925)..(925): n is a, c, g, or t
  misc_feature (928)..(929): n is a, c, g, or t
  misc_feature (961)..(961): n is a, c, g, or t
  misc_feature (973)..(973): n is a, c, g, or t
  misc_feature (1005)..(1005): n is a, c, g, or t
  misc_feature (1007)..(1007): n is a, c, g, or t
  misc_feature (1011)..(1011): n is a, c, g, or t
  misc_feature (1014)..(1014): n is a, c, g, or t
  misc_feature (1017)..(1017): n is a, c, g, or t
  misc_feature (1023)..(1023): n is a, c, g, or t
  misc_feature (1037)..(1037): n is a, c, g, or t
  misc_feature (1040)..(1040): n is a, c, g, or t
  misc_feature (1043)..(1043): n is a, c, g, or t
  misc_feature (1047)..(1048): n is a, c, g, or t
  misc_feature (1055)..(1056): n is a, c, g, or t
  misc_feature (1059)..(1059): n is a, c, g, or t
  misc_feature (1087)..(1088): n is a, c, g, or t

SEQ ID NO: 44 - DNA, 752 bp, Homo sapiens; identical to SEQ ID NO: 40

SEQ ID NO: 45 - DNA, 950 bp, Homo sapiens
  misc_feature (862)..(862): n is a, c, g, or t
  misc_feature (865)..(865): n is a, c, g, or t
  misc_feature (900)..(900): n is a, c, g, or t
  misc_feature (924)..(924): n is a, c, g, or t
  misc_feature (934)..(934): n is a, c, g, or t
  misc_feature (943)..(943): n is a, c, g, or t
  misc_feature (949)..(949): n is a, c, g, or t
tagagaaattactatgagaggatcgcatcaccatcaccatcacggatcctatttaggtgacactatagaatcgtcgacccacgcgtccgcccacgcgtccgcggacgcgtgggcagaacaggatggggacagcagcaagaccatcgagatcagcgacatgaagtaccacatttttcagatgatgatgcagtatctgtactacggaggaacagaatccatggagatccccaccactgacatcctggagctgctgtcagctgccagcctgttccagctggatgccctgcagaggcactgcgagatcctgtgctcccagaccctcagcatggagagtgccgtgaacacctacaaatatgccaagatccacaatgccccagaactggccctgttctgtgagggcttcttcctcaagcacatgaaggccctactggagcaggatgccttccggcagctcatctacggccgcagcagcaaagtgcagggcctggatccactgcaggacctgcagaacaccctggcagagcgcgtgcactctgtctacatcacctcccgggtgtgaggcagggggcggaggctgccgaggccagggcctgtggaggtgccagggcccaccatgtcggggtatggttgtaggccctcttggagccaggttcacggggctgtttcctcctcctcccccagatgtcccccctgtcaccgggcagctcaccctcatctcctctgccctagagctgtttgttcaatcactgatgggcaaaggggagatgtagctaactggtggccctcctccccatctcagtttgcaactcaagggcagccatgcactccccctgggtgtcgctctcccctcctgcaggtcagnagntgatcctgatccacctccgcccaggccctccaagntctactcacccctagggcctcagnaaactcaaancatcccaantggggnt

SEQ ID NO: 46 - DNA, 795 bp, Homo sapiens
ggtaccgtcgaccatgtttcatcaggttcgtcgtgttatgaccattctgtttctgaccatggtgattagctattttggttgtatgaaagccgcaccgatgaaagaagcaaatattcgcggtcagggtggtctggcatatccgggtgttcgtacccatggcaccctggaaagcgttaatggtccgaaagcaggtagccgtggtctgaccagcctggcagatacctttgaacatgtgatcgaagaactgctggatgaagatcagaaagttcgtccgaacgaagaaaataacaaagatgccgatctgtataccagccgtgttatgctgagcagccaggttccgctggaaccgcctctgctgtttctgctggaagaatacaaaaattatctggacgcagcaaatatgagcatgcgtgttcgtcgtcatagcgatccggcacgtcgtggtgaactgagcgtttgtgatagcattagcgaatgggttaccgcagcagataaaaaaaccgcagttgatatgagcggtggcaccgttaccgttctggaaaaagttccggttagcaaaggtcagctgaaacagtacttctacgaaaccaaatgcaatccgatgggttataccaaagaaggttgtcgcggtattgataaacgtcattggaatagccagtgtcgtaccacccagagctatgttcgtgcactgaccatggatagcaaaaaacgtattggttggcgctttattcgtattgataccagctgtgtttgtaccctgaccattaaacgtggtcgttaagcggccgcgagctc

SEQ ID NO: 47 - DNA, 2430 bp, Homo sapiens; identical to SEQ ID NO: 17

SEQ ID NO: 48 - DNA, 872 bp, Homo sapiens; identical to SEQ ID NO: 2
  misc_feature (799)..(799): n is a, c, g, or t
  misc_feature (837)..(837): n is a, c, g, or t
  misc_feature (870)..(870): n is a, c, g, or t

SEQ ID NO: 49 - DNA, 2170 bp, Homo sapiens
ggcgcgccgtcgaccatgcgtggaagccatcgtgcagcaccggcactgcgtcctcgtggtcgtctgtggcctgttctggccgttctggcagcagcagcagccgcaggttgtgcacaggcagcaatggatgaatgtaccgatgaaggtggtcgtccgcagcgttgtatgccggaatttgtgaatgcagcctttaatgttaccgttgttgcaaccaatacctgtggcacccctccggaagaatattgtgttcagaccggtgttaccggtgtgaccaaaagctgtcatctgtgtgatgcaggtcagccgcatctgcagcatggtgcagcatttctgaccgattataataatcaggcagataccacctggtggcagagccagaccatgctggcaggcgttcagtatccgagcagcattaatctgaccctgcatctgggtaaagcctttgatattacctatgtgcgcctgaaatttcataccagccgtccggaaagctttgcaatttataaacgcacccgtgaagatggtccgtggattccgtatcagtattatagcggtagctgcgaaaatacctatagcaaagccaatcgtggttttattcgtaccggtggtgatgaacagcaggcactgtgcaccgatgaatttagcgatatttctccgctgaccggtggtaatgttgcatttagcaccctggaaggtcgtccgagcgcatataattttgataattctccggttctgcaggaatgggttaccgcaaccgatattcgtgttaccctgaatcgtctgaatacctttggcgacgaagtgtttaatgatccgaaagtgctgaaaagctattattatgccatcagcgattttgcagttggtggtcgttgtaaatgtaatggtcatgccagcgaatgcatgaaaaacgagtttgacaaactggtgtgcaattgcaaacataatacctatggcgtggattgcgaaaaatgcctgccgttttttaatgatcgtccgtggcgtcgtgcaaccgcagaaagcgcaagcgaatgtctgccgtgtgattgtaatggtcgcagccaggaatgttattttgatccggaactgtatcgtagcaccggtcatggtggtcattgtaccaattgccaggataataccgatggtgcacattgcgaacgttgccgtgaaaatttttttcgcctgggcaataatgaagcatgtagcagctgtcattgttctccggttggtagcctgagcacccagtgtgatagctatggtcgttgtagctgtaaaccgggtgttatgggtgataaatgtgatcgttgccagcctggttttcatagcctgaccgaagcaggttgtcgtccgtgtagctgtgatccgagcggtagcattgatgaatgcaatattgaaaccggtcgttgcgtttgcaaagataacgtggaaggttttaattgtgaacgctgcaaaccgggtttttttaatctggaaagcagcaatccgcgtggttgtaccccgtgtttttgttttggtcatagcagcgtttgtaccaatgcagttggttatagcgtttatagcatcagcagcacctttcagattgatgaagatggttggcgtgcagaacagcgtgatggtagcgaagcaagcctggaatggtctagcgaacgtcaggatattgcagtgatcagcgatagctattttccgcgttattttatcgcaccggcaaaatttctgggtaaacaggttctgagctatggtcagaatctgagctttagctttcgtgttgatcgtcgtgatacccgtctgagcgcagaagatctggttctggaaggtgcaggtctgcgtgttagcgttccgctgattgcacagggtaatagctatccgagcgaaaccaccgttaaatatgtgtttcgtctgcatgaagcaaccgattatccgtggcgtccggcactgaccccgtttgaatttcagaaactgctgaacaacctgaccagcattaaaattcgtggcacctatagcgaacgtagcgcaggttatctggatgatgttaccctggcaagcgcacgtccgggtccgggtgttccggcaacctgggttgaaagctgtacctgtccggttggttatggtggtcagttttgtgaaatgtgtctgagcggttatcgtcgtgaaacctaagcggccgcttaattaa

SEQ ID NO: 50 - DNA, 2914 bp, Homo sapiens; identical to SEQ ID NO: 18

SEQ ID NO: 51 - DNA, 1648 bp, Homo sapiens
ggcgcgccgtcgaccatggcacgtgctgctgcactgctgccgagccgttctccgcctacaccgctgctgtggcctctgctgctgctgctgctgctggaaaccggtgcacaggatgttcgtgttcaggttctgccggaagttcgtggtcagctgggtggcaccgttgaactgccgtgtcatctgctgcctccggttccgggtctgtatattagcctggttacctggcagcgtccggatgcaccggcaaatcatcagaatgttgcagcctttcatccgaaaatgggtccgagctttccgagcccgaaaccgggtagcgaacgtctgagctttgttagcgcaaaacagagcaccggtcaggataccgaagcagaactgcaggatgcaaccctggcactgcatggtctgaccgttgaagatgaaggtaactatacctgcgaatttgcaactttccctaaaggtagcgttcgtggtatgacctggctgcgtgttattgcaaaaccgaaaaatcaggcagaagcccagaaagttacctttagccaggacccgaccaccgttgcactgtgtattagcaaagaaggtcgtccgcctgcacgtattagctggctgagcagcctggattgggaagcaaaagaaacccaggttagcggcaccctggcaggcaccgttaccgttaccagccgttttaccctggttccgagcggtcgtgcagatggtgttaccgtgacctgtaaagtggaacacgaaagctttgaagaaccggcactgattccggttaccctgagcgttcgttatccgcctgaagttagcattagcggctatgatgataattggtatctgggtcgtaccgatgccaccctgagctgtgatgttcgtagcaatccggaaccgaccggttatgattggagcaccacctctggcacctttccgaccagcgcagttgcacagggtagccagctggttattcatgcagtggatagcctgtttaataccacctttgtttgtaccgttaccaatgcagttggtatgggtcgtgcagaacaggttatttttgttcgtgaaaccccgaataccgctggtgccggtgcaaccggtggtattattggtggcattattgcagcaattattgcaaccgcagttgcagcaaccggtattctgatttgtcgtcagcagcgtaaagaacagactctgcaaggtgccgaagaagatgaagatctggaaggtccgcctagctataaaccgcctaccccgaaagcaaaactggaagcacaggaaatgccgagccagctgtttaccctgggtgcaagcgaacattctccgctgaaaaccccgtattttgatgccggtgcaagctgtaccgagcaggaaatgcctcgttatcacgaactgccgaccctggaagaacgtagcggtccgctgcatccgggtgcaaccagcctgggtagcccgattccggttccgcctggtccgcctgcagttgaagatgttagcctggatctggaagatgaagaaggtgaagaagaggaagaatatctggacaaaatcaacccgatttatgatgcactgagctatagcagcccgagcgatagctatcagggtaaaggttttgttatgagccgtgccatgtatgtgtaagcggccgcttaattaa

SEQ ID NO: 52 - DNA, 1909 bp, Homo sapiens; identical to SEQ ID NO: 23

SEQ ID NO: 53 - DNA, 844 bp, Homo sapiens; identical to SEQ ID NO: 5
  misc_feature (2)..(2): n is a, c, g, or t
  misc_feature (673)..(673): n is a, c, g, or t
  misc_feature (678)..(678): n is a, c, g, or t
  misc_feature (732)..(732): n is a, c, g, or t
  misc_feature (740)..(740): n is a, c, g, or t
  misc_feature (761)..(761): n is a, c, g, or t
  misc_feature (782)..(782): n is a, c, g, or t
  misc_feature (790)..(790): n is a, c, g, or t
  misc_feature (795)..(795): n is a, c, g, or t
  misc_feature (804)..(804): n is a, c, g, or t
  misc_feature (812)..(812): n is a, c, g, or t
  misc_feature (818)..(819): n is a, c, g, or t
  misc_feature (823)..(823): n is a, c, g, or t
  misc_feature (833)..(834): n is a, c, g, or t
  misc_feature (843)..(843): n is a, c, g, or t

SEQ ID NO: 54 - DNA, 2674 bp, Homo sapiens
ggcgcgccgtcgaccatgagccgtggtggtagctatccgcatctgctgtgggatgttcgtaaacgtagcctgggtctggaagatccgagccgtctgcgtagccgttatctgggtcgtcgtgaatttattcagcgtctgaaactggaagcaaccctgaatgttcatgatggttgcgttaataccatttgctggaacgataccggtgaatatattctgagcggctctgatgataccaaactggtgattagcaatccgtatagccgtaaagttctgaccaccattcgtagcggtcatcgtgcaaatatctttagcgcaaaatttctgccgtgtaccaacgataaacaaattgttagctgcagcggtgatggtgtgattttttataccaacgtggaacaggatgcagaaaccaatcgtcagtgtcagtttacctgtcattatggcaccacctatgaaattatgaccgtgccgaatgatccgtatacctttctgagctgtggtgaagatggcaccgttcgttggtttgatacccgtattaaaaccagctgtaccaaagaagattgcaaagacgatattctgattaattgtcgtcgtgcagcaaccagcgttgcaatttgtccgcctattccgtattatctggcagttggttgtagcgatagcagcgttcgtatttatgatcgtcgtatgctgggcacccgtgcaaccggtaattatgcaggtcgtggcaccaccggtatggttgcacgttttattccgagccatctgaataataaaagctgtcgtgttaccagcctgtgttatagcgaagatggtcaggaaattctggttagctatagcagcgattatatctacctgttcgatccgaaagatgataccgcacgtgaactgaaaaccccgagcgcagaagaacgtcgcgaagaactgcgtcagcctccggttaaacgtctgcgtctgcgtggtgattggagcgataccggtccgcgtgcacgtccggaaagcgaacgtgaacgtgatggtgaacagagcccgaatgttagcctgatgcagcgtatgagcgatatgctgagccgttggtttgaagaagcaagcgaagttgcacagagcaatcgtggtcgtggtcgtagccgtccgcgtggtggcaccagccagagcgatattagcaccctgccgaccgttccgagcagtccggatctggaagttagcgaaaccgcaatggaagttgatacaccggcagaacagtttctgcagccgagcaccagcagcaccatgagcgcacaggcacatagcaccagctctccgaccgaatctccgcatagcacaccgctgctgtctagtccggatagcgaacagcgtcagagcgttgaagcaagcggtcatcatacccatcatcagagcgatagcccgagcagcgttgttaataaacagctgggtagcatgagcctggatgaacagcaggataacaacaatgaaaaactgagcccgaaaccgggtacaggtgaaccggttctgagcctgcattatagcaccgaaggcaccaccacctctaccattaaactgaactttaccgatgaatggtctagcattgcaagcagcagccgtggtattggtagccattgtaaaagcgaaggtcaggaagaaagctttgttccgcagagcagcgttcagcctccggaaggtgatagcgaaaccaaagcaccggaagaaagcagcgaagatgtgaccaaatatcaggaaggtgttagcgcagaaaatccggtggaaaaccatattaacatcacccagagcgacaaatttaccgcaaaaccgctggatagcaatagcggtgaacgtaatgatctgaatctggatcgtagctgtggtgttccggaagaatctgcaagcagcgaaaaagcaaaagaaccggaaaccagcgatcagaccagcaccgaaagcgcaaccaatgaaaataataccaacccggaaccgcagtttcagaccgaagcaaccggtccgagcgcacatgaagaaaccagcacccgtgatagcgcactgcaggataccgatgattctgatgatgatccggttctgattccgggtgcacgttatcgtgcaggtccgggtgatcgtcgtagcgcagttgcacgtattcaggaattttttcgtcgtcgtaaagaacgcaaagagatggaagaactggataccctgaatattcgtcgtccgctggtgaaaatggtttataaaggccatcgtaatagccgtaccatgatcaaagaagcaaatttttggggagccaattttgttatgagcggtagcgattgcggtcatatttttatttgggatcgccataccgcagaacatctgatgctgctggaagcagataatcatgttgttaattgtctgcagccgcatccgtttgatccgattctggcaagcagcggcattgattatgacattaaaatttggtcaccgctggaagaaagccgcatttttaatcgtaaactggccgatgaagttattacccgtaacgaactgatgctggaagaaacccgtaataccattaccgttccggcaagctttatgctgcgtatgctggcaagcctgaatcatattcgtgcagatcgtctggaaggtgatcgtagcgaaggtagcggtcaggaaaatgaaaacgaggacgaagaataagcggccgcttaattaa

SEQ ID NO: 55 - DNA, 939 bp, Homo sapiens; identical to SEQ ID NO: 30

SEQ ID NO: 56 - DNA, 932 bp, Homo sapiens
catcaccatcaccatcacggatcctatttaggtgacactatagaatcgtcgacccacgcgtccgtcttgctagattctcaggggctgctagattcatccctgatggcatcaggcactgccagccgctcagaggatgaggagtcactggcagggcagaagcgagcctcctcccaggccttgggcaccatccctaaacggagaagctcctccaggttcatcaagaggaagaagttcgatgatgagctggtggagagcagcctggcaaaatcttctacccgggcaaagggggccagtggggtggaaccagggcgctgttcggggagtgaaccctcctccagtgagaagaagaaggtatccaaagcccccagcactcctgtgccacccagcccagccccagcccctggactcaccaagcgtgtgaagaagagtaaacagccacttcaggtgaccaaggatctgggccgctggaagcctgcagatgacctcctgctcataaatgctgtgttgcagaccaacgacctgacctccgtccacctgggcgtgaaattcagctgccgcttcacccttcgggaggtccaggagcgttggtacgccctgctctacgatcctgtcatctccaagttggcctgtcaggccatgaggcagctgcacccagaggctattgcagccatccagagcaaggccctgtttagcaaggctgaggagcagctgctgagcaaagtgggatcgaccagccagcccaccttggagaccttccaggacctgctgcacagacaccctgatgccttctacctggcccgtaccgcgaaggccctgcaggcccactggcagctcatgaagcagtattacctgctggaggaccagacagccgctgcccaaaggggaccaagtgctgaacttctctgatgcagaggacctgattgatgacagta

SEQ ID NO: 57 - DNA, 885 bp, Homo sapiens; identical to SEQ ID NO: 35

SEQ ID NO: 58 - DNA, 767 bp, Homo sapiens
  misc_feature (36)..(36): n is a, c, g, or t
  misc_feature (49)..(50): n is a, c, g, or t
  misc_feature (61)..(61): n is a, c, g, or t
  misc_feature (209)..(210): n is a, c, g, or t
  misc_feature (445)..(445): n is a, c, g, or t
  misc_feature (500)..(500): n is a, c, g, or t
  misc_feature (504)..(504): n is a, c, g, or t
  misc_feature (535)..(536): n is a, c, g, or t
  misc_feature (563)..(563): n is a, c, g, or t
  misc_feature (595)..(595): n is a, c, g, or t
  misc_feature (609)..(609): n is a, c, g, or t
  misc_feature (611)..(611): n is a, c, g, or t
  misc_feature (635)..(635): n is a, c, g, or t
  misc_feature (640)..(640): n is a, c, g, or t
  misc_feature (653)..(653): n is a, c, g, or t
  misc_feature (662)..(662): n is a, c, g, or t
  misc_feature (665)..(665): n is a, c, g, or t
  misc_feature (676)..(676): n is a, c, g, or t
  misc_feature (691)..(691): n is a, c, g, or t
  misc_feature (693)..(693): n is a, c, g, or t
  misc_feature (696)..(696): n is a, c, g, or t
  misc_feature (702)..(703): n is a, c, g, or t
  misc_feature (708)..(708): n is a, c, g, or t
  misc_feature (711)..(711): n is a, c, g, or t
  misc_feature (722)..(722): n is a, c, g, or t
  misc_feature (726)..(726): n is a, c, g, or t
  misc_feature (734)..(734): n is a, c, g, or t
  misc_feature (737)..(738): n is a, c, g, or t
  misc_feature (753)..(753): n is a, c, g, or t
  misc_feature (755)..(755): n is a, c, g, or t
  misc_feature (758)..(758): n is a, c, g, or t
  misc_feature (760)..(760): n is a, c, g, or t
  misc_feature (765)..(765): n is a, c, g, or t
acccacgcgtccgagaagattaaggaaaagtacatngatcaagaagagnncaacaaaacanagcccatctggaccagaaatcccgacgatattactaatgaggagtacggagaattctataagagcttgaccaatgactgggaagatcacttggcagtgaagcatttttcatttgaaggacagttggaattcagagcccttctatttgnnccacgacgtgctccttttgatctgtttgaaaacagaaagaaaaagaacaacatcaaattgtatgtacgcagagttttcatcatggataactgtgaggagctaatccctgaatatctgaacttcattagaggggtggtagactcggaggatctccctctaaacatatcccgtgagatgttgcaacaaagcaaaattttgaaagttatcaggaagaatttggtcaaaaaatgcttanaactctttactgaactggcggaagataaagagaactacaagaaattctatgagcngttntctaaaaacataaagcttggaacacacgaannctctcaaaatcgggaagaagctttcanagctgttaagggtctacacatctgcctctggnggatgaaatggttncntctcaggactacctgccccaggantgaangggaacccagaancatattctnttnttttccaaggngagacccagggcccngntanttaccnnacccnttnggggaaccgcntttnggaaaccnggnnctacaaagcgatctnanttnanctggncc

SEQ ID NO: 59 - DNA, 790 bp, Homo sapiens; identical to SEQ ID NO: 10

SEQ ID NO: 60 - DNA, 1417 bp, Homo sapiens
cctaaggaatactatagaggtcgcatcaccatcaccatcacggtcgacccacgcgtccgggcacagagagtgtgcagggtggtccttgtccctgcccaagctgcaagaggctctgcgaaggtctctcctgcccctgtccaccttgcacagtcctagccgggggaggaggggagaaatctggcgtgccaggagctggcaactgcccagcccttcctggatgtgggactgaggagtccgtcctgaaccgaagcatgatcctgttagctcttccagctctccaggcgccaacaaccatatggtctcgctccccacccgggctcaccttcagaccagcggcagcgctcacccaccacgcctgccagggaagctcagtcccaacagaatccagagagggcccaccacatgtgcctgcctgtgacggcctgtgacagggccccagccagggccaacgagctggaggggcccaaggagctgggtgcagcgctggggccccggacacccgctctgctgcaggagaatggctactcatcacacgctgtggatgggactggccctgctgggggtgctgggcgacctgcaggcagcaccggaggcccaggtctccgtgcagcccaacttccagcaggacaagttcctggggcgctggttcaacgcgggcctcgcctccaactcgagctggctccgggagaaaaaagcggcgttccccctgtgccactctgtggggtcccccgccacatcaggcggcctccaccccgcactccaccttactcacgacaaacccctggcgagaccctccacacgccgctccaactcccaacccccctcttctccttacctaaccaacaacccctctgaccaaccccccaatcacgtttctcggcaaccctacccccacccacctccaccctctcctcaccccaccctccaccctagccaccgacgcctcccatccccctacccctctcttccccatctccctcccctcccctccacccccccccctaaacctctccccctcaccccatcaaccttacctcgcacacatacttacttgcgtcccccacaccccccccccaccaccccacacatcacccccgtctcctacccaacatacagtcccaccatttcacaacccaccactgaaacccccacccttactccactatccctccctcccccacctccccctcccatccgtgtcttcccctcccacctccaccccacaacctcatccacaccccaccctccctactttcgaacatcccttcattccatcatccttcatcccaccgcccatcacacatgactcctcatcaccactctcacaccccccaatcacgaccccacatcgcttgctataacacctactccatctcacttcactctcacaaacccacttcgctctaccacagcttcc

SEQ ID NO: 61 - DNA, 878 bp, Homo sapiens
ctatgagaggatcgcatcaccatcaccatcacggatcctatttaggtgacactatagaatcgtcgacccacgcgtccgcccaggccccagcccagcaggacctgcaggggacgagccagccgagagcccatcggagaccccaggcccccgcccagcaggacctgcaggggacgagccagccgagagcccatcggagaccccaggcccccgcccggcaggacctgcaggggacgagccagccgagagcccatcggagaccccaggccccagcccggcaggacctacaagggatgagccagccgagagcccatcggagaccccaggcccccgcccggcaggacctgcaggggacgagccagccgagagcccatcggagaccccaggcccccgcccggcaggacctgcaggggacgagccagccgagagcccatcggagaccccaggccccagcccggcaggacctacaagggatgagccagccaaggcgggggaggcagcagagttgcaggacgcagaggtggagtcttctgccaagtctgggaagccttaaggaaaggagtgcccgtcggcgtcttggtcctcctgtccctgctgcaggggctggggcctccggagctgctgcgggctcccctcaggctctgcttcgtgacccgtgacccatgacccacagtgctggcctcctgtggggccactatagcagccaccagaagccgcgaggccctcagggaagcccaaggcctgcagaagcctcctggcctggctgtgtcttccccacccagctctcccctgcgcccctgtctttgtaaattgacccttctggagtggggggcggcgggcagggctgcttttcttagtctgataccaagcaaggccttttc

SEQ ID NO: 62 - DNA, 1417 bp, Homo sapiens; identical to SEQ ID NO: 60

SEQ ID NO: 63 - DNA, 878 bp, Homo sapiens; identical to SEQ ID NO: 61

SEQ ID NO: 64 - DNA, 1134 bp, Homo sapiens
ctcttttaagaaggagaaatttaactatgagaggtcgcatcaccatcaccatcacggatcctatttaggtgacactatagaatcgtcgacccacgcgtccggccgggtcgtaaaacttgaaaatggtgaaatagagaccattgcccggtttggttcgggcccttgcaaaacccgagatgatgagcctgtgtgtgggagacccctgggtatccgtgcagggcccaatgggactctctttgtggccgatgcatacaagggactatttgaagtaaatccctggaaacgtgaagtgaaactgctgctgtcctccgagacacccattgaggggaagaacatgtcctttgtgaatgatcttacagtcactcaggatgggaggaagatttatttcaccgattctagcagcaaatggcaaagacgagactacctgcttctggtgatggagggcacagatgacgggcgcctgctggagtatgatactgtgaccagggaagtaaaagttttattggaccagctgcggttcccgaatggagtccagctgtctcctgcagaagactttgtcctggtggcagaaacaaccatggccaggatacgaagagtctacgtttctggcctgatgaagggcggggctgatctgtttgtggagaacatgcctggatttccagacaacatccggcccagcagctctggggggtactgggtgggcatgtcgaccatccgccctaaccctgggttttccatgctggatttcttatctgagagaccctggattaaaaggatgatttttaagctctttagtcaagagacggtgatgaagtttgtgccgcggtacagcctcgtcctagaactcagcgacagcggtgccttccggagaagcctgcatgatcccgatgggctggtggccacctacatcagcgaggtgcacgaacacgatgggcacctgtacctgggctctttcaaggtcccctttcttctgcagactcagccttcaggctgtttagcctccagatagctgcccctgccacgcaggccagagtcttccactcaggcaccagctggttcagggaggagctgtgaccagcctgttcaagtgtcaccatgcacctgatagtccctgaaaggtgggggaagctgcat

SEQ ID NO: 65 - DNA, 2554 bp, Homo sapiens
ggcgcgccgtcgaccgttgcagatgcaaccctgagcgcacaggcaacaccgctgctgcatgcactgaccgcagcacatgcatatatcatgatgtttgtgcatacctgtcgtgttggtcagagcgaaattcgtagcattagcgttaatcagtggggtagccagctgggtctgagcgttctgagcaaactgagccagctgtattgtagcctggtttgggaaagcaccgttctgctgagcctgtgtaccccgaatagcctgccgagcggttgtgaatttggtcaggcagatatgcagaaactggtgccgaaagatgaaaaagcaggcacaacccagggtggtaaacgttctgatggtgaacaggatggtgcagcaggtagcatggatgcaagcacccagggtctgctggaaggtattggtctggatggtgataccctggcaccgatggaaaccgatgaaccgaccgcaagcgatagcaaaggtaaaagcaaaattacaccggcaatggcagcacgcattaaacaaattaaaccgctgctgagcgcaagcagccgtctgggtcgtgcactggcagaactgtttggtctgctggttaaactgtgtgttggttctccggttcgtcagcgtcgtagccatcatgcagcaagcaccaccaccgcaccgacaccggcagcacgtagcaccgcaagcgcactgaccaaactgctgaccaaaggtctgtcttggcagcctccgccttataccccgacaccgcgttttcgtctgaccttttttatttgcagcgttggttttaccagcccgatgctgtttgatgaacgcaaatatccgtatcatctgatgctgcagaaatttctgtgtagcggtggtcataatgcactgtttgaaacctttaattgggcactgagcatgggtggtaaagttccggttagcgaaggtctggaacatagcgatctgccggatggcaccggtgaatttctggatgcatggctgatgctggttgaaaaaatggttaatccgaccaccgttctggaatctccgcatagcctgcctgcaaaactgcctggtggtgttcagaattttccgcagtttagcgcactgcgttttctggttgttacccagaaagcagcctttacctgcattaaaaacctgtggaatcgtaaaccgctgaaagtttatggtggtcgtatggcagaaagcatgctggcaattctgtgtcatattctgcgtggtgaaccggttattcgtgaacgtctgagcaaagaaaaagaaggttctcgcggagaagaagataccggtcaggaagaaggcggtagccgtcgcgaaccgcaggttaatcagcagcagctgcagcaactgatggatatgggttttacccgtgaacatgcaatggaagcactgctgaataccagcaccatggaacaggcaaccgaatatctgctgacccatccgcctccgattatgggtggtgttgttcgtgatctgagcatgagcgaagaggatcagatgatgcgtgcaattgcaatgagcctgggtcaggatattccgatggatcagcgtgcagaatctccggaagaagttgcctgtcgtaaagaagaagaagaacgcaaagcacgcgaaaaacaggaagaggaagaggcaaaatgcctggaaaaatttcaggatgcagatccgctggaacaggatgaactgcatacctttaccgataccatgctgcctggttgttttcatctgctggatgaactgccggataccgtttatcgtgtttgcgatctgattatgaccgccattaaacgtaatggtgccgattatcgcgatatgattctgaaacaggttgttaatcaggtttgggaagcagcagatgttctgattaaagcagcactgccgctgaccacctctgataccaaaaccgttagcgaatggattagccagatggcaaccctgccgcaggcaagcaatctggcaacccgtattctgctgctgaccctgctgtttgaagaactgaaactgccgtgtgcatgggttgttgaaagcagcggtattctgaatgtgctgatcaaactgctggaagttgttcagccgtgtctgcaggcagcaaaagaacagaaagaggttcagaccccgaaatggattacaccggtgctgctgctgatcgatttttatgaaaaaaccgccattagcagcaaacgtcgtgcacagatgaccaaatatctgcagagcaatagcaataattggcgttggtttgatgatcgtagcggtcgttggtgtagctatagcgcaagcaataatagcaccattgatagcgcatggaaaagcggtgaaaccagcgttcgctttaccgcaggtcgtcgtcgttataccgttcagtttaccaccatggttcaggttaatgaagaaaccggtaatcgtcgtccggttatgctgacactgctgcgtgttccgcgtctgaataaaaacagcaaaaactccaatggtcaggaactggaaaaaaccctggaagaaagcaaagaaatggatattaaacgcaaagaaaataaaggctaagcggccgcttaattaa

SEQ ID NO: 66 - DNA, 604 bp, Homo sapiens; identical to SEQ ID NO: 3

SEQ ID NO: 67 - DNA, 1551 bp, Homo sapiens
ggcgcgccacgcgtcgaccatgatgagctttggtggtgcagatgcactgctgggtgcaccgtttgcaccgctgcatggtggtggtagcctgcattatgcactggcacgtaaaggtggtgccggtggcacccgtagcgcagcaggtagcagcagcggttttcatagctggacccgtaccagcgttagcagcgtgagcgcaagcccgagccgttttcgtggtgcgggtgcagcaagcagcaccgatagcctggataccctgagcaatggtccggaaggttgtatggttgcagttgcaaccagccgtagcgaaaaagaacagctgcaggcactgaatgatcgttttgcaggctatattgataaagttcgtcagctggaagcccataatcgtagcctggaaggtgaagcagccgcactgcgtcagcagcaggcaggtcgtagcgcaatgggtgaactgtatgaacgtgaagttcgtgaaatgcgtggtgcagttctgcgtctgggtgcagcacgtggtcagctgcgtctggaacaagaacatctgctggaagatattgcacatgttcgtcagcgtctggatgatgaagcacgtcagcgtgaagaagccgaagcagcagcccgtgccctggcacgttttgcacaagaggcggaagcagcacgtgttgatctgcagaaaaaagcacaggcactgcaagaagaatgcggttatctgcgtcgtcatcatcaagaagaagttggcgaactgctgggtcagattcagggtagcggtgcagcacaggcacagatgcaggcagaaacccgtgatgcactgaaatgtgatgttaccagcgcactgcgtgaaattcgtgcacagctggaaggtcatgcagttcagagcaccctgcagagcgaagaatggtttcgtgttcgtctggatcgtctgagcgaagcagcaaaagttaataccgatgcaatgcgtagcgcacaagaagaaattaccgaatatcgtcgtcagctgcaggctcgtaccaccgaactggaagcactgaaaagcaccaaagatagcctggaacgtcagcgtagcgaactggaagatcgtcatcaggcagatattgcaagctatcaagaagcaattcagcagctggatgcagaactgcgtaataccaaatgggaaatggcagcacagctgcgtgaatatcaggatctgctgaatgttaaaatggccctggatattgaaattgcagcctatcgtaaactgctggaaggcgaagaatgtcgtattggttttggtccgattccgtttagcctgccggaaggtctgccgaaaattccgagcgttagcacccatattaaagtgaaaagcgaagaaaaaattaaagtggtggaaaaatcagaaaaagaaaccgtgatcgtggaagaacagaccgaagaaacccaggttaccgaagaagtgaccgaagaagaagaaaaagaagccaaagaagaagagggcaaagaagaggaaggcggagaagaggaagaagctgaaggcggagaggaagaaaccaaaagctaagcggccgcttgattaattaa

SEQ ID NO: 68 - DNA, 2809 bp, Homo sapiens
ggcgcgccgtcgaccatgaatgattttgataccgaagatctgaccattgcagaacagcgtctgcagcatcatgcagataaagccctgaccatgaataatctgacctttgatgtgattcatcagggtcaggatctgctgcagtatgttaatgaagttcaggcaagcggtgttgaactgctgtgtgatcgtgatgttgatatggcaacccgtgttcaggacctgctggaatttctgcatgaaaaacagcaggaactggatctggcagcagaacagcatcgtaaacatctggaacagtgtgttcagctgcgtcatctgcaggcagaagttaaacaggttctgggttggattcgtaatggtgaaagcatgctgaatgcaggtctgattaccgcaagcagcctgcaggaagcagaacagctgcagcgtgaacatgaacagtttcagcatgccattgaaaaaacccatcagagcgcactgcaggttcagcagaaagcagaagcaatgctgcaggccaatcactatgatatggatatgattcgcgattgtgcagaaaaagttgcaagccattggcagcagctgatgctgaaaatggaagatcgtctgaaactggttaatgccagcgttgcattttataaaaccagcgaacaggtttgtagcgttctggaaagcctggaacaggaatataaacgcgaagaggattggtgtggtggtgcagataaactgggtccgaatagcgaaaccgatcatgttaccccgatgattagcaaacacctggaacagaaagaagcatttctgaaagcctgtaccctggcacgtcgtaatgcagatgtgtttctgaaatatctgcaccgcaatagcgttaatatgcctggtatggtgacccatatcaaagcaccggaacagcaggttaaaaacatcctgaatgaactgtttcagcgtgaaaatcgtgttctgcattattggaccatgcgtaaacgtcgtctggatcagtgtcagcagtatgttgtttttgaacgtagcgcaaaacaggcactggaatggattcatgataacggcgaattttatctgagcacccataccagcaccggtagcagcattcagcatacccaggaactgctgaaagaacacgaagaatttcagattaccgccaaacagaccaaagaacgtgttaaactgctgattcagctggcagatggtttttgtgaaaaaggtcatgcacatgcagccgaaattaaaaaatgtgtgaccgcagttgataaacgttatcgtgattttagcctgcgtatggaaaaatatcgtaccagcctggaaaaagcactgggtattagcagcgatagcaacaaaagcagcaaaagcctgcagctggatattattccggcaagcattccgggtagcgaagttaaactgcgtgatgccgcacatgaactgaatgaagaaaaacgtaaaagcgcacgtcgcaaagaatttattatggccgaactgattcagaccgaaaaagcatatgttcgtgatctgcgtgaatgtatggatacctatctgtgggaaatgaccagcggtgtggaagaaattccgcctggcattgtgaacaaagaactgatcatctttggcaacatgcaggaaatctacgagtttcataacaatatttttctgaaagaactggaaaaatatgaacagctgccggaagatgttggtcattgttttgtgacctgggcagataaatttcagatgtatgtgacctactgcaaaaataaaccggatagcacccagctgattctggaacatgcaggcagctattttgatgaaattcagcagcgtcatggtctggcaaatagcattagcagctatctgattaaaccggttcagcgcattaccaaatatcagctgctgctgaaagagctgctgacctgttgcgaagaaggtaaaggcgaaatcaaagatggtctggaagttatgctgagcgttccgaaacgtgcaaatgatgcaatgcatctgagcatgctggaaggctttgatgaaaatattgaaagccagggtgaactgattctgcaggaaagctttcaggtttgggacccgaaaaccctgattcgtaaaggtcgtgaacgtcacctgtttctgtttgaaatgagcctggtgtttagcaaagaagttaaagatagcagcggtcgcagcaaatatctgtataaaagcaaactgtttaccagcgaactgggtgttaccgaacatgttgaaggtgatccgtgtaaatttgcactgtgggttggtcgtaccccgaccagcgataataaaattgttctgaaagccagcagcattgaaaacaaacaggattggatcaaacatattcgcgaagttattcaggaacgcaccattcatctgaaaggtgcactgaaagaaccgattcatattccgaaaaccgcaccggcaacccgtcagaaaggtcgtcgtgatggtgaagatctggatagccaaggtgatggtagcagccagccggataccattagcattgcaagccgtaccagccagaataccctggatagcgataaactgagcggtggttgtgaactgaccgtggtgattcatgattttaccgcctgcaatagcaatgaactgaccattcgtcgtggtcagaccgttgaagttctggaacgtccgcatgataaaccggattggtgtctggttcgtaccaccgatcgttctccggcagcagaaggtctggttccttgcggtagcctgtgtattgcacatagccgtagcagcatggaaatggaaggcatctttaaccacaaagattcattataagcggccgcttaattaa

SEQ ID NO: 69 - DNA, 1945 bp, Homo sapiens
ggcgcgccgtcgaccatggaccctggtagcggtggtggaggtggaggcggtgggggtggtggtagcagcagcggtagcagctctagcgatagcgcaccggattgttgggatcaggcagatatggaagcaccgggtccgggtccttgtggaggaggtggttctctggcagcagcagccgaagcacagcgtgaaaatctgagcgcagcatttagccgtcagctgaatgttaatgcaaaaccgtttgttccgaatgttcatgcagcagaatttgttccgagctttctgcgtggtccggcagctccacctccgcctgccggtggtgcagcaaataatcatggtgcaggtagcggtgccggtggtcgtgcagctcctgttgaaagcagccaagaagaacagagcctgtgcgaaggtagcaatagcgcagttagcatggaactgagcgaaccgattgttgaaaatggtgaaaccgaaatgtctccggaagaaagctgggaacataaagaagaaattagcgaagcagaaccgggtggtggcagcctgggtgatggtcgtccgcctgaagaaagcgcacatgaaatgatggaagaagaggaagaaattccgaaaccgaaaagcgttgttgcaccgcctggtgcaccgaaaaaagaacatgtgaacgtggtgtttattggtcatgttgatgccggtaaaagcaccattggtggccagattatgtatctgaccggtatggttgataaacgcaccctggaaaaatatgaacgcgaggccaaagaaaaaaatcgtgaaacctggtatctgagctgggcactggataccaatcaggaagaacgcgataaaggtaaaaccgttgaagttggccgtgcatatttcgaaaccgagaaaaaacatttcaccattctggacgctccaggtcataaaagctttgtgccgaatatgattggtggtgcaagccaggcagatctggcagttctggttattagcgcacgcaaaggtgaatttgaaaccggttttgaaaaaggtggtcagacccgtgaacatgcaatgctggcaaaaaccgcaggcgttaaacatctgatcgtgctgatcaataaaatggatgatccgaccgttaattggagcaatgaacgctatgaagagtgcaaagaaaaactggtgccgtttctgaaaaaagtgggcttcaacccgaaaaaagatatccattttatgccgtgtagcggtctgaccggtgcaaatctgaaagaacagagcgatttttgtccgtggtatattggtctgccgtttattccgtatctggataacctgccgaattttaatcgtagcgttgatggtccgattcgtctgccgatcgtggataaatataaagatatgggcaccgttgttctgggtaaactggaaagcggtagcatttgtaaaggtcagcagctggttatgatgccgaataaacataatgtggaagtgctgggtattctgtctgatgatgttgaaaccgataccgttgcaccgggtgaaaacctgaaaattcgcctgaaaggcatcgaagaagaagaaatcctgcctggttttattctgtgtgatccgaataatctgtgtcatagcggtcgtacctttgatgcccagattgtgatcatcgaacacaaaagcattatctgtccgggttataatgcagttctgcacattcatacctgcattgaagaagttgaaattaccgcactgatttgcctggttgataaaaaaagcggtgagaaaagcaaaacccgtccgcgttttgttaaacaggatcaggtttgtattgcacgtctgcgtaccgcaggcaccatttgtctggaaacctttaaagattttccgcagatgggtcgttttaccctgcgtgatgaaggtaaaaccattgccattggcaaagttctgaaactggttccggaaaaagactaagcggccgcttaattaa

SEQ ID NO: 70 - DNA, 975 bp, Homo sapiens; identical to SEQ ID NO: 4

SEQ ID NO: 71 - DNA, 1284 bp, Homo sapiens
  misc_feature (936)..(936): n is a, c, g, or t
  misc_feature (938)..(938): n is a, c, g, or t
  misc_feature (952)..(952): n is a, c, g, or t
  misc_feature (989)..(989): n is a, c, g, or t
  misc_feature (1005)..(1005): n is a, c, g, or t
  misc_feature (1030)..(1030): n is a, c, g, or t
  misc_feature (1046)..(1046): n is a, c, g, or t
  misc_feature (1048)..(1048): n is a, c, g, or t
  misc_feature (1053)..(1053): n is a, c, g, or t
  misc_feature (1055)..(1055): n is a, c, g, or t
  misc_feature (1070)..(1070): n is a, c, g, or t
  misc_feature (1083)..(1083): n is a, c, g, or t
  misc_feature (1091)..(1091): n is a, c, g, or t
  misc_feature (1128)..(1129): n is a, c, g, or t
  misc_feature (1151)..(1151): n is a, c, g, or t
  misc_feature (1157)..(1159): n is a, c, g, or t
  misc_feature (1165)..(1165): n is a, c, g, or t
  misc_feature (1169)..(1170): n is a, c, g, or t
  misc_feature (1172)..(1172): n is a, c, g, or t
  misc_feature (1180)..(1181): n is a, c, g, or t
  misc_feature (1200)..(1200): n is a, c, g, or t
  misc_feature (1211)..(1212): n is a, c, g, or t
  misc_feature (1217)..(1217): n is a, c, g, or t
  misc_feature (1225)..(1225): n is a, c, g, or t
  misc_feature (1227)..(1227): n is a, c, g, or t
  misc_feature (1241)..(1241): n is a, c, g, or t
  misc_feature (1257)..(1257): n is a, c, g, or t
  misc_feature (1269)..(1269): n is a, c, g, or t
  misc_feature (1279)..(1280): n is a, c, g, or t
tagagaaattactatgagaggatcgcatcaccatcaccatcacggatcctatttaggtgacactatagaatcgtcgacccacgcgtccggcagcatggcggcgggggcggctgaggcagctgtagcggccgtggaggaggtcggctcagccgggcagtttgaggagctgctgcgcctcaaagccaagtccctccttgtggtccatttctgggcaccatgggctccacagtgtgcacagatgaacgaagttatggcagagttagctaaagaactccctcaagtttcatttgtgaagttggaagctgaaggtgttcctgaagtatctgaaaaatatgaaattagctctgttcccacttttctgtttttcaagaattctcagaaaatcgaccgattagatggtgcacatgccccagagttgaccaaaaaagttcagcgacatgcatctagtggctccttcctacccagcgctaatgaacatcttaaagaagatctcaaccttcgcttgaagaaattgactcatgctgccccctgcatgctgtttatgaaaggaactcctcaagaaccacgctgtggtttcagcaagcagatggtggaaattcttcacaaacataatattcagtttagcagttttgatatcttctcagatgaagaggttcgacagggactcaaagcctattccagttggcctacctatcctcagctctatgtttctggagagctcataggaggacttgatataattaaggagctagaagcatctgaagaactagatacaatttgtcccaaagctcccaaattagaggaaaggctcaaagtgctgacaaataaaagcttctgtgatgctctttatgaaaggaaacaaacaggaagcaaaatgtggattcagcaaacaaattctggaaatactaatagtactggggttgaatatgaaacatncnatatattggaggangaaaaaattcggcaaggattaaagcttactcaaaatnggccaacatacccccnacctgtatgtgaaaggggaactggnggaggattggaaattngngaagnanctgaaaaaaaatggngaattgctgcctntactgganagaaaaaaataaaaaatcttaaacttggggcccactnntggaaaaaaattttattacttngggacnnnttctgnattnntnccccaaannggactaagaaaaaaaaatncccgccttccnnaaaangtttgggnanttccaaggccggcnaaaaaaaggaggtaanttttttcccccnaaaaaaaggnnaaaa

SEQ ID NO: 72 - DNA, 1150 bp, Homo sapiens
  misc_feature (1)..(1): n is a, c, g, or t
  misc_feature (824)..(824): n is a, c, g, or t
  misc_feature (911)..(911): n is a, c, g, or t
  misc_feature (940)..(940): n is a, c, g, or t
  misc_feature (942)..(942): n is a, c, g, or t
  misc_feature (967)..(967): n is a, c, g, or t
  misc_feature (974)..(974): n is a, c, g, or t
  misc_feature (978)..(978): n is a, c, g, or t
  misc_feature (988)..(988): n is a, c, g, or t
  misc_feature (1011)..(1011): n is a, c, g, or t
  misc_feature (1033)..(1033): n is a, c, g, or t
  misc_feature (1036)..(1036): n is a, c, g, or t
  misc_feature (1045)..(1045): n is a, c, g, or t
  misc_feature (1047)..(1047): n is a, c, g, or t
  misc_feature (1052)..(1052): n is a, c, g, or t
  misc_feature (1056)..(1056): n is a, c, g, or t
  misc_feature (1071)..(1071): n is a, c, g, or t
  misc_feature (1075)..(1075): n is a, c, g, or t
  misc_feature (1081)..(1082): n is a, c, g, or t
  misc_feature (1101)..(1101): n is a, c, g, or t
  misc_feature (1111)..(1112): n is a, c, g, or t
  misc_feature (1117)..(1117): n is a, c, g, or t
  misc_feature (1119)..(1119): n is a, c, g, or t
  misc_feature (1121)..(1121): n is a, c, g, or t
  misc_feature (1129)..(1130): n is a, c, g, or t
  misc_feature (1137)..(1138): n is a, c, g, or t
  misc_feature (1140)..(1140): n is a, c, g, or t
  misc_feature (1145)..(1145): n is a, c, g, or t
naattagagaaattactatgagaggatcgcatcaccatcaccatcacggatcctatttaggtgacactatagaatcgtcgacccacgcgtccggtgggaggggaggagtggagatggcggcggcggcggctcaggggggcgggggcggggagccccgtagaaccgagggggtcggcccgggggtcccgggggaggtggagatggtgaaggggcagccgttcgacgtgggcccgcgctacacgcagttgcagtacatcggcgagggcgcgtacggcatggtcagctcggcctatgaccacgtgcgcaagactcgcgtggccatcaagaagatcagccccttcgaacatcagacctactgccagcgcacgctccgggagatccagatcctgctgcgcttccgccatgagaatgtcatcggcatccgagacattctgcgggcgtccaccctggaagccatgagagatgtctacattgtgcaggacctgatggagactgacctgtacaagttgctgaaaagccagcagctgagcaatgaccatatctgctacttcctctaccagatcctgcggggcctcaagtacatccactccgccaacgtgctccaccgagatctaaagccctccaacctgctcatcaacaccacctgcgaccttaagatttgtgatttcggcctggcccggattgccgatcctgagcatgaccacaccggcttcctgacggagtatgtggctacgcgctggtaccgggccccagagatcatgctgaactccaagggctataccaagtccatcgacatctggtctgtgggctgcattctggctganatgctctctaaccggcccatcttcctggcaagcactacctggatcagctcaaccacattctgggcatcctgggctccccatcccagnaggacctgaattgtatcatcaacatgaangnccgaaactacctacagtctctgccntccaaancaangtggctgggnccaagcttttccccaagtcaaantccaaagcctttgacctgctgnacngaattttancntttancccnataaacgaatccagnggangaaagnncttggttccccctacttgnaacaatattnnacccnangnataacccnnggcccannanccttnccttc

SEQ ID NO: 73 - DNA, 1594 bp, Homo sapiens
ggcgcgccgtcgaccatgcctggccctgttgttcgtgcatttagcgaagatgaagcactggcacagcaggaaaatcgtcattggcgtcgtggcacctttgaaaaactgggattccctcagattctgctggaaaaaagcgttagcgttcagaccaatctggcatctccggaaccgtatctgcatccgagccagagcgaagatctggcagcatgtgcacagtttgaaagcagccgtcagagccgtagcggtgttccgagcagcagctgtgtttttccgacctttaccctgcgtaaaccgagcagcgaaaccgatattgaaaattgggccagcaaacactttaataaacacacccagggtctgtttcgtcgtaaagtgagcattgcaaatatgctggcgtggagcagcgaaagcattaaaaaaccgatgattgttaccagcgatcgccatgttaaaaaagaagcctgcgagctgtttaaactgattcagatgtatatgggtgatcgtcgtgcaaaagcagatccgctgcatgttgcactggaagttgcaaccaaaggttggagcgttcagggtctgcgtgatgaactgtatattcagctgtgtcgtcagaccaccgaaaattttcgtctggaaagcctggcacgtggttgggaactgatggcaatttgtctggcattttttccgcctaccccgaaatttcatagctatctggaaggctatatctatcgtcatatggacccggttaatgataccaaagtgacccagcatattaaagaactgctggaacgcaacaccaaaaaaaaaagcaaactgcgcaaaaaaccgaaaccgtatgttgaagaaccggatggtgttgcaattagcacctatgccaaatattgctatcacaaactgcagaaagcagcactgaccggtgcaaaaaaaggtctgaaaaaaccgaatgtggaagaaattcgtcatgccaaaaatgcagtttttagcccgagcatgtttggtagcgcactgcaagaggttatgggtatgcagcgtgaacgttatccggaacgtcagctgccgtgggttcagacccgtctgagcgaagaagttctggcactgaacggtgatcagaccgaaggtatttttcgtgttccgggtgatattgatgaagttaacgccctgaaactgcaggttgatcagtggaaagttccgactggtctggaagatccgcatgttccggcaagcctgctgaaactgtggtatcgtgaactggaagaaccgctgattccgcatgaattttatgaacagtgcattgcacattatgattctccggaagcagcagttgcagttgttcatgcactgcctcgtattaatcgtatggtgctgtgctatctgattcgttttctgcaggtttttgttcagcctgcaaatgttgcagttaccaaaatggatgttagcaatctggcaatggttatggcaccgaattgtctgcgttgtcagtctgatgatccgcgtgtgatttttgaaaacacccgcaaagaaatgagctttctgcgtgttctgattcagcatctggataccagctttatggaaggtgtgctgtaagcggccgcttaattaa

SEQ ID NO: 74 - DNA, 630 bp, Homo sapiens
ggtaccgtcgaccatggcatttaccgaacattctccgctgacaccgcatcgtcgtgatctgtgtagccgtagcatttggctggcacgtaaaattcgtagcgatctgaccgcactgaccgaaagctatgttaaacatcagggcctgaacaaaaatattaacctggatagcgcagatggtatgccggttgcaagcaccgatcagtggagcgaactgaccgaagcagaacgtctgcaggaaaatctgcaggcatatcgtacctttcatgttctgctggcacgtctgctggaagatcagcaggttcattttaccccgaccgaaggtgattttcatcaggcaattcataccctgctgctgcaggttgcagcatttgcatatcagatcgaggaactgatgatcctgctggaatataaaattccgcgtaatgaagcagatggcatgccgattaatgttggtgatggtggcctgtttgaaaaaaaactgtggggtctgaaagttctgcaagaactgagccagtggaccgttcgtagcattcatgatctgcgctttattagcagccatcagaccggtattccggcacgtggtagccattatattgccaataacaaaaaaatgtaagcggccgcgagctc

SEQ ID NO: 75 - DNA, 854 bp, Homo sapiens
  misc_feature (800)..(801): n is a, c, g, or t
  misc_feature (828)..(828): n is a, c, g, or t
  misc_feature (848)..(848): n is a, c, g, or t
  misc_feature (850)..(851): n is a, c, g, or t
ttaactatgagaggatcgcatcaccatcaccatcacggatcctatttaggtgacactatagaatcgtcgacccacgcgtccgcccacgcgtccggtcggccagaggctgtatcgcatccattgaatactgtgaccgaggacatgtacaccaacgggtctcctgccccaggtagccctgcccaggtcaagggacaggaggtgcggaaagtgcgactcatacagtttgagaaggtcacagaagagcccatgggaatcactctgaagctgaatgaaaaacagtcctgtacggtggccagaattcttcatggtggcatgatccatagacaaggctcccttcacgtgggggatgagatcctagaaatcaatggcacaaatgtgacaaatcattcagtggatcagctgcagaaggcgatgaaagaaaccaaaggaatgatctcattaaaagtaattcccaaccagcaaagccgtcttcctgcactacagatgttcatgagagcgcagtttgactatgatcccaaaaaggacaatctgatcccttgcaaggaggcgggactgaagtttgctactggggacattatccagattatcaacaaggatgacagcaattggtggcagggacgggtggaaggctcctccaaggagtcagcagggattgatcccttcccctgagctgcaggaatggcgagtggcaagtatggctcagtcagctcctagcgaagccccgagctgcagtccctttgggaagaaaaaaaagtacaaagacaaatatctggccaagcacagctcgatttttgatcagnnggatggtgtttcctacgaggaagtcgntccggctccctgcattcaanannaaa

SEQ ID NO: 76 - DNA, 1291 bp, Homo sapiens
ggcgcgccgtcgaccgttctgggtcgtccggatcgtccgcgtgatctggaactgaccgatctggcagaacgtagcgttcgtctgacctggattcctggtgatgcaaataatagcccgattaccgattatgttgtgcagtttgaagaagatcagtttcagcctggtgtttggcatgatcacagcaaatatccgggtagcgttaatagcgcagttctgcgtctgagcccgtatgttaattatcagtttcgcgtgattgccattaatgaagttggtagcagccatccgagcctgccgagcgaacgttatcgtaccagcggagcaccgcctgaaagcaatccgggtgatgttaaaggtgaaggcacccgcaaaaataatatggaaatcacctggaccccgatgaatgcaaccagcgcatttggtccgaatctgcgctatattgttaaatggcgtcgtcgtgaaacccgtgaagcatggaataatgttaccgtttggggtagccgttacgttgttggtcagacaccggtttatgttccgtatgaaattcgtgttcaggccgaaaatgattttggtaaaggtccggaaccggaaagcgttattggttatagcggtgaagattatccgcgtgcagcaccgaccgaagttaaagttcgtgttatgaatagcaccgcaattagcctgcagtggaatcgtgtttatagcgataccgttcagggtcagctgcgtgaatatcgtgcatattattggcgtgaaagcagcctgctgaaaaatctgtgggttagccagaaacgtcagcaggcaagctttccgggtgatcgtctgcgtggtgttgttagccgtctgtttccgtatagcaattacaaactggaaatggtggttgttaatggtcgtggtgatggtccgcgtagcgaaaccaaagaatttaccacaccggaaggtgttccgagcgcaccgcgtcgttttcgtgttcgtcagccgaatctggaaaccattaacctggaatgggatcatccggaacatccgaatggtattatgatcggctataccctgaaatatgttgcctttaatggcaccaaagtgggcaaacaaatcgttgaaaactttagcccgaaccagaccaaattcaccgttcagcgtaccgatccggttagccgttatcgttttaccctgagcgcacgtacccaggttggtagcggtgaagcagttaccgaagaatctccggcaccgcctaatgaagcatataccaacaatcaggcagatattgcaacccagggctaagcggccgcttaattaa

SEQ ID NO: 77 - DNA, 1026 bp, Homo sapiens
tattttaaggaggaagaattaactattgagaggtcgcatcaccatcaccatcacggtcgacccacgcgtccggaaaagagtcttgtggataccgtatatgcattaaaggatgaagttcaagaattaagacaggacaacaaaaagatgaagaaatctctagaggaagaacagagagcccgcaaagacctggagaagctggtgaggaaagtcctgaagaacatgaatgatcctgcctgggatgagaccaatctataagggacgtcctcagttctttctgttgaagaccagttctgaggtgaagctgggcacccctgacccaagtcggggtgcactcaggaccacagggcagggctgggtggggcgccaccttgctctctgtatatagaaaagctggagcttattctgcgaatggagacgatcaaaccatgactgatgaatccagacaggagggattgactctgaggacctgagctacatcaatccactctgtgaacatctcagttacctcattctgcaataagttcagtgactgactaaaagtcttgtttttccagactttgaattgaatatataaatattatatatacatgtttcttgtaaatatcccattttgaatgcatacctgtggtggttctgtccgggctaatccccatgctagaatgtcctttccagctacgtgaataagaagtcccatgcccgcatccaccggaagcagaagcctggtggatgcctggttcgttccgcagcaccagggcctccaccgtgctgtggcagcaccccccatgtcggtattttctaaataaccttatttatacctgcaggagatacacttcagtcccattcagaagtcttctcttaaagcagcattacagtcccagacctgcgggttttctgagggcaactttgctggctgacagactcagtcttgacctcaaggaaggcccataccggcactgcccgcatccatctagaggtgtttgcctcttgtccgctgcctgagtactgggatcttcacatgaatttgct

SEQ ID NO: 78 - DNA, 984 bp, Homo sapiens; identical to SEQ ID NO: 7

SEQ ID NO: 79 - DNA, 1156 bp, Homo sapiens
atatttaaagaaggaggaatttaactatgagaggatcgcatcaccatcaccatcacggatcctatttaggtgacactatagaatcgtcgacccacgcgtccgcccacgcgtccgcccacgcgtccgagcagaggttgatctttgccggaaaacagctggaagatggtcgcaccctgtctgactacaacatccagaaagagtccaccttgcacctggtgctccgtctcagaggtgggatgcagatcttcgtgaagaccctgactggtaagaccatcactctcgaggtggagccgagtgacaccattgagaatgtcaaggcaaagatccaagacaaggaaggcatccctcctgaccagcagaggttgatctttgctgggaaacagctggaagatggacgcaccctgtctgactacaacatccagaaagagtccaccctgcacctggtgctccgtcttagaggtgggatgcagatcttcgtgaagaccctgactggtaagaccatcactctcgaagtggagccgagtgacaccattgagaatgtcaaggcaaagatccaagacaaggaaggcatccctcctgaccagcagaggttgatctttgctgggaaacagctggaagatggacgcaccctgtctgactacaacatccagaaagagtccaccctgcacctggtgctccgtcttagaggtgggatgcagatcttcgtgaagaccctgactggtaagaccatcactctcgaagtggagccgagtgacaccatcgagaatgtcaaggcaaagatccaagacaaggaaggcatccctcctgaccagcagaggttgatctttgctgggaaacagctggaagatggacgcaccctgtctgactacaacatccagaaagagtccaccctgcacctggtgctccgtctcagaggtgggatgcaaatcttcgtgaagaccctgactggtaagaccatcaccctcgaggtgagcccagtgaccacatcgagattgtcaaggcaaagatccaagaataaggaaggcatccttctgatcagcaagaggttgatctttgctgggaaacagcttggaagaatgacgcaccttgttctgaactacaacatccagaaagagtcactcttgcacttggttcctgcgctttgaggggggtggac

SEQ ID NO: 80 - DNA, 1179 bp, Homo sapiens
  misc_feature (866)..(866): n is a, c, g, or t
  misc_feature (929)..(929): n is a, c, g, or t
  misc_feature (938)..(938): n is a, c, g, or t
  misc_feature (941)..(941): n is a, c, g, or t
  misc_feature (954)..(954): n is a, c, g, or t
  misc_feature (965)..(965): n is a, c, g, or t
  misc_feature (969)..(969): n is a, c, g, or t
  misc_feature (992)..(992): n is a, c, g, or t
  misc_feature (1016)..(1016): n is a, c, g, or t
  misc_feature (1018)..(1018): n is a, c, g, or t
  misc_feature (1021)..(1021): n is a, c, g, or t
  misc_feature (1024)..(1024): n is a, c, g, or t
  misc_feature (1057)..(1057): n is a, c, g, or t
  misc_feature (1066)..(1066): n is a, c, g, or t
  misc_feature (1078)..(1078): n is a, c, g, or t
  misc_feature (1093)..(1093): n is a, c, g, or t
  misc_feature (1107)..(1107): n is a, c, g, or t
  misc_feature (1119)..(1120): n is a, c, g, or t
  misc_feature (1135)..(1135): n is a, c, g, or t
  misc_feature (1137)..(1138): n is a, c, g, or t
tagagaaattactatgagaggatcgcatcaccatcaccatcacggatcctatttaggtgacactatagaatcgtcgacccacgcgtccgcggaggactgcaggggcctgagccgctgctgccgccgccgccgcgcagccccacatcaacgcaccggggtcctgtcaccgccaccgccaaaaaagtcaccgccgctagggtcgccgttgcatcggtgcagggcaagatggcatccgccacagactcgcgctatgggcagaaggagtcctcggatcagaacttcgactacatgttcaagattctcatcatcggcaacagcagcgtgggcaagacgtccttcctcttccgctatgctgacgactcgttcacgcctgccttcgtcagcaccgtgggcatcgacttcaaggtcaagaccatctatcgcaacgacaagaggatcaagctgcagatctgggacacagcagggcaagagcggtaccggaccatcaccaccgcatactaccggggcgctatgggcttcatcctcatgtatgacatcaccaacgaggaatccttcaatgcagtgcaggactggtccacccagatcaagacctactcatgggacaatgcccaggtgctgctggtaggaaacaagtgtgacatggaggatgagcgggtggtgtcatcagaacgtggccggcagctagctgaccaccttgggttcgagttctttgaggcaagcgccaaggacaacattaacgtcaagcagacctttgagcgcctggtggatgtcatctgcgagaagatgtccgagtcgttggacacggcggaccctgcggtcacaggcgccaagcagggcccacagctcagtgaccagcaggtgccacngcaccaggactgcgcctgctgagagccatcccactccctttcccctcttcctgtcttcccacnttccccaantanccgggcctgaccnggcccctacanccangggcaaaaaaccctgctcctgantaacccgtccccttatttttatgnanctnttntttatttattgaaaattcccccaggggccaggntccctggcngcccaagcctgnccctctgtaaataanccctttcccatcanctggggggttcnnggcccgtaaatcccntnncctctgaaccccccccgcttttttaaaatcccccctccaat

SEQ ID NO: 81 - DNA, 890 bp, Homo sapiens
  misc_feature (650)..(651): n is a, c, g, or t
  misc_feature (659)..(659): n is a, c, g, or t
  misc_feature (689)..(690): n is a, c, g, or t
  misc_feature (734)..(734): n is a, c, g, or t
  misc_feature (740)..(740): n is a, c, g, or t
  misc_feature (745)..(745): n is a, c, g, or t
  misc_feature (754)..(755): n is a, c, g, or t
  misc_feature (766)..(766): n is a, c, g, or t
  misc_feature (780)..(780): n is a, c, g, or t
  misc_feature (797)..(797): n is a, c, g, or t
  misc_feature (819)..(820): n is a, c, g, or t
atactatgagaggtcgcatcaccatcaccatcacggatcctatttaggtgacactatagaatcgtcgactctggaccttggctgtcactcagttggggtagcgtcttcgctgttgcccttagggacggctgtgggcctgcggggggtgggggcccgaagcgccagagatggctgctcagcgagggatgcccagctccgccgtgagggtcctggaagaggcgttgggcatgggtttgacggcagccggggacgcgagggacacggcggacgcggtggcggctgagggcgcctactacctggaacaggtcaccataactgaagcatctgaagatgactatgaatatgaagagataccagatgacaattttagcatcccagaaggtgaagaagatctggcaaaagcaattcagatggcccaagaacaggctacagatactgaaattttggaacggaaaacagttcttccttcaaagcatgcagtacctgaagtaatagaagactttctctgcaatttcttgatcaaaatgggaatgaccagaactcttgattgctttcagtctgaatggtatgagttaatacagaaaggagtgactgaacttagaactgttgggaatgttccagatgtctacacccagattatgcttttggannatgagaancaaaatttaaagaaagattttgagcactanncaacagcagctgagtatgttattttttaaatgacattttcttcnttttcntttgnactaaatannagagttgagtngagctgatatatgntatataccagagccttnattttttgaaactgatttttcnntagtgtaagatgtgagagcttcttagcaatttattaaacgatgatcgactatccattatacttacacaga

SEQ ID NO: 82 - DNA, 944 bp, Homo sapiens; identical to SEQ ID NO: 37

SEQ ID NO: 83 - DNA, 1002 bp, Homo sapiens
aaatttatttgctttgtgagcggataacaattataatagattcaattgtgagcggataacaatttcacacagaattcattaaagaggagaaattaactatgagaggatcgcatcaccatcaccatcacggatcctatttaggtgacactatagaatcgtcgacccacgcgtccggcgagcgcgccggggagggtgcgaggcggcacccgcggctgcgctccgcccgcctcccggcaactctgcccagcgccgcgcgccgtgcgcgccgtcccgccgccgtcgccgccgccgccgccgccggtgccccggccggctgccgtcgcgggcaggggtctgcttaggacacgggtccccgcccggggactggggcatccccggcgcagctgagaggcgcagagcccggggggcgcagattgcgctccagcgcccagccgctgaacggcgtgggcaggtgggcggtggggttccagggcgccccgaggacagggggccccgacttcaggggaaccccaaccctgaggggcgtacatagtaatcacgccccagccgcaccggaccttgcgctcatcccttgcgtcccccacttctgcacaaacttttctgacgccctggctcgtgggggtcgtggagagcgctggggctaccaggtgggctcccaccccgccggaccctagccacgctgacctcctgcctctcctaacctcagtggcgacctctccaggccgggccgggctcggcactcggagcgagtgcggcaaccactgtcgctctccgaaggctcctgcgccccccggggcagctgggcggggtaatgccctcagtgatggagaagccgagcgcgggctctgggatcctgtcccgtagccgggccaagacggtgcccaacggcggacagccccactcggaggatgacagcagcgaggaggagcactcgcacgacagcatgatccgcgttggaaccaattaccaggccgtaattcccggagtgcaagcctgagagcc

SEQ ID NO: 84 - DNA, 1179 bp, Homo sapiens; identical to SEQ ID NO: 80
  misc_feature (866)..(866): n is a, c, g, or t
  misc_feature (929)..(929): n is a, c, g, or t
  misc_feature (938)..(938): n is a, c, g, or t
  misc_feature (941)..(941): n is a, c, g, or t
  misc_feature (954)..(954): n is a, c, g, or t
  misc_feature (965)..(965): n is a, c, g, or t
  misc_feature (969)..(969): n is a, c, g, or t
  misc_feature (992)..(992): n is a, c, g, or t
  misc_feature (1016)..(1016): n is a, c, g, or t
  misc_feature (1018)..(1018): n is a, c, g, or t
  misc_feature (1021)..(1021): n is a, c, g, or t
  misc_feature (1024)..(1024): n is a, c, g, or t
  misc_feature (1057)..(1057): n is a, c, g, or t
  misc_feature (1066)..(1066): n is a, c, g, or t
  misc_feature (1078)..(1078): n is a, c, g, or t
  misc_feature (1093)..(1093): n is a, c, g, or t
  misc_feature (1107)..(1107): n is a, c, g, or t
  misc_feature (1119)..(1120): n is a, c, g, or t
  misc_feature (1135)..(1135): n is a, c, g, or t
  misc_feature (1137)..(1138): n is a, c, g, or t

SEQ ID NO: 85 - DNA, 890 bp, Homo sapiens; identical to SEQ ID NO: 81
  misc_feature (650)..(651): n is a, c, g, or t
  misc_feature (659)..(659): n is a, c, g, or t
  misc_feature (689)..(690): n is a, c, g, or t
  misc_feature (734)..(734): n is a, c, g, or t
  misc_feature (740)..(740): n is a, c, g, or t
  misc_feature (745)..(745): n is a, c, g, or t
  misc_feature (754)..(755): n is a, c, g, or t
  misc_feature (766)..(766): n is a, c, g, or t
  misc_feature (780)..(780): n is a, c, g, or t
  misc_feature (797)..(797): n is a, c, g, or t
  misc_feature (819)..(820): n is a, c, g, or t

SEQ ID NO: 86 - DNA, 944 bp, Homo sapiens; identical to SEQ ID NO: 37

SEQ ID NO: 87 - DNA, 1002 bp, Homo sapiens; identical to SEQ ID NO: 83

SEQ ID NO: 88 - DNA, 3228 bp, Homo sapiens
atgactactgcaaactgtggcgcccacgacgagctcgacttcaaactcgtctttggcgaggacggggcgccggcgccgccgcccccgggctcgcggcctgcagatcttgagccagatgattgtgcatccatttacatctttaatgtagatccacctccatctactttaaccacaccactttgcttaccacatcatggattaccgtctcactcttctgttttgtcaccatcgtttcagctccaaagtcacaaaaactatgaaggaacttgtgagattcctgaatctaaatatagcccattaggtggtcccaaaccctttgagtgcccaagtattcaaattacatctatctctcctaactgtcatcaagaattagatgcacatgaagatgacctacagataaatgacccagaacgggaatttttggaaaggccttctagagatcatctctatcttcctcttgagccatcctaccgggagtcttctcttagtcctagtcctgccagcagcatctcttctaggagttggttctctgatgcatcttcttgtgaatcgctttcacatatttatgatgatgtggactcagagttgaatgaagctgcagcccgatttacccttggatcccctctgacttctcctggtggctctccagggggctgccctggagaagaaacttggcatcaacagtatggacttggacactcattatcacccaggcaatctccttgccactctcctagatccagtgtcactgatgagaattggctgagccccaggccagcctcaggaccctcatcaaggcccacatccccctgtgggaaacggaggcactccagtgctgaagtttgttatgctgggtccctttcaccccatcactcacctgttccttcacctggtcactcccccaggggaagtgtgacagaagatacgtggctcaatgcttctgtccatggtgggtcaggccttggccctgcagtttttccatttcagtactgtgtagagactgacatccctctcaaaacaaggaaaacttctgaagatcaagctgccatactaccaggaaaattagagctgtgttcagatgaccaagggagtttatcaccagcccgggagacttcaatagatgatggccttggatctcagtatcctttaaagaaagattcatgtggtgatcagtttctttcagttccttcaccctttacctggagcaaaccaaagcctggccacacccctatatttcgcacatcttcattacctccactagactggcctttaccagctcattttggacaatgtgaactgaaaatagaagtgcaacctaaaactcatcatcgagcccattatgaaactgaaggtagccgaggggcagtaaaagcatctactgggggacatcctgttgtgaagctcctgggctataacgaaaagccaataaatctacaaatgtttattgggacagcagatgatcgatatttacgacctcatgcattttaccaggtgcatcgaatcactgggaagacagtcgctactgcaagccaagagataataattgccagtacaaaagttctggaaattccacttcttcctgaaaataatatgtcagccagtattgattgtgcaggtattttgaaactccgcaattcagatatagaacttcgaaaaggagaaactgatattggcagaaagaatactagagtacgacttgtgtttcgtgtacacatcccacagcccagtggaaaagtcctttctctgcagatagcctctatacccgttgagtgctcccagcggtctgctcaagaacttcctcatattgagaagtacagtatcaacagttgttctgtaaatggaggtcatgaaatggttgtgactggatctaattttcttccagaatccaaaatcatttttcttgaaaaaggacaagatggacgacctcagtgggaggtagaagggaagataatcagggaaaaatgtcaaggggctcacattgtccttgaagttcctccatatcataacccagcagttacagctgcagtgcaggtgcacttttatctttgcaatggcaagaggaaaaaaagccagtctcaacgttttacttatacaccagttttgatgaagcaagaacacagagaagagattgatttgtcttcagttccatctttgcctgtgcctcatcctgctcagacccagaggccttcctctgattcagggtgttcacatgacagtgtactgtcaggacagagaagtttgatttgctccatcccacaaacatatgcatccatggtgacctcatcccatctgccacagttgcagtgtagagatgagagtgttagtaaagaacagcatatgattccttctccaattgtacaccagccttttcaagtcacaccaacacctcctgtggggtcttcctatcagcctatgcaaactaatgttgtgtacaatggaccaacttgtcttcctattaatgctgcctctagtcaagaatttgattcagttttgtttcagcaggatgcaactctttctggtttagtgaatcttggctgtcaaccactgtcatccataccatttcattcttcaaattcaggctcaacaggacatctcttagcccatacacctcattctgtgcataccctgcctcatctgcaatcaatgggatatcattgttcaaatacaggacaaagatctctttcttctccagtggctgaccagattacaggtcagccttcgtctcagttacaacctattacatatggtccttcacattcagggtctgctacaacagcttccccagcagcttctcatcccttggctagttcaccgctttctgggccaccatctcctcagcttcagcctatgccttaccaatctcctagctcaggaactgcctcatcaccgtctccagccaccagaatgcattctggacagcactcaactcaagcacaaagtacgggccaggggggtctttctgcaccttcatccttaatatgtcacagtttgtgtgatccagcgtcatttccacctgatggggcaactgtgagcattaaacctgaaccagaagatcgagagcctaactttgcaaccattggtctgcaggacatcactttagatgatgtgaacgagataattgggagagacatgtcccagatttctgtttcccaaggagcaggggtgagcaggcaggctcccctcccgagtcctgagtccctggatttaggaagatctgatgggctctaa

SEQ ID NO: 89 - DNA, 963 bp, Homo sapiens
atggaggtggaggccgtctgtggtggcgcgggcgaggtggaggcccaggactctgaccctgcccctgccttcagcaaggcccccggcagcgccggccactacgaactgccgtgggttgaaaaatataggccagtaaagctgaatgaaattgtcgggaatgaagacaccgtgagcaggctagaggtctttgcaagggaaggaaatgtgcccaacatcatcattgcgggccctccaggaaccggcaagaccacaagcattctgtgcttggcccgggccctgctgggcccagcactcaaagatgccatgttggaactcaatgcttcaaatgacagcatgaccgacggagcccagcaagccttgaggagaaccatggaaatctactctaaaaccactcgcttcgcccttgcttgtaatgcttcggataagatcatcgagcccattcagtcccgctgtgcagtcctccggtacacaaagctgaccgacgcccagatcctcaccaggctgatgaatgttatcgagaaggagagggtaccctacactgatgacggcctagaagccatcatcttcacggcccagggagacatgaggcaggcgctgaacaacctgcagtccaccttctcaggatttggcttcattaacagtgagaacgtgttcaaggtctgtgacgagccccacccactgctggtaaaggagatgatccagcactgtgtgaatgccaacattgacgaagcctacaagattcttgctcacttgtggcatctgggctactcaccagaagatatcattggcaacatctttcgagtgtgtaaaactttccaaatggcagaatacctgaaactggagtttatcaaggaaattggatacactcacatgaaaatagcggaaggagtgaactctcttttgcagatggcaggcctcctggcaaggctgtgtcagaagacaatggccccggtggccagttag

SEQ ID NO: 90 - DNA, 997 bp, Homo sapiens
ctggtccggtcggaatttcggatacggtctgcatgtcagcagttgcccggcggcggcgacgcgagcggcagcagcccgggccccgcggtagccgccagcgcggcacggccagcaggagcgccaggcgcgagcccgcggccactcgctgcctccggggcactgcgagaggctttgcgctccccagcgcggcgttcggactcggggccagcgcggccacggccgcgcacaaaggacagcagacgccgggactcgggggctgtgcccagggaccggcccggggacccccgcccgcgccgcgtcccctccacgcctcccctccccgggcggccggagcgcgagccggagcgggccccgtcatatgacagcggcgacgccgcagccggcgagcgcgcgtgctgcctgccccgctgcgccacggccgccggcgcctggggtggcccttgcctcgccccgctgagcggtcgcccgtcgccgccgccccgcgccccccgcgcccgggcttgcgggctccgggggaggagccgaggggagcccccagccggcgccgagcctaaaatggccacctctgttgctgaagatcggggctcatccgcctgcataaccgggacacctgaggacccccagcaccaccacaaaccaccgcgggcggcgtgccagtcataggcgcgttctcctgcgcggttaagggtcggcgacccaataagcgggccggcccaccatatcaatcatttaggccatctttgttagtctatcccgcaatcctttcactccccgggggggcgtcgggggtcgaaacctccttgtccccgggtgaacacccggggcaaaggggggaaaaaggggtcgaaaggcgccgccacgggtagtgaaaacccttggggcacccctcttgcccgataacaaaggggcgtccccctggggcagcgacaggacccgggttatttacccgcgtggggcactgcgcgcgggcactgttatcggggaatagtggcgtggt

SEQ ID NO: 91 - DNA, 2252 bp, Homo sapiens
aaaaagcgccccgccccgcgctcctctcttgactttgagcgtccggcggtcgcagagccaggaggcggaggcgcgcgggccagcctgggccccagcccacaccttcaccagggcccaggagccaccatgtggcgatgtccactggggctactgctgttgctgccgctggctggccacttggctctgggtgcccagcagggtcgtgggcgccgggagctagcaccgggtctgcacctgcggggcatccgggacgcgggaggccggtactgccaggagcaggacctgtgctgccgcggccgtgccgacgactgtgccctgccctacctgggcgccatctgttactgtgacctcttctgcaaccgcacggtctccgactgctgccctgacttctgggacttctgcctcggcgtgccacccccttttcccccgatccaaggatgtatgcatggaggtcgtatctatccagtcttgggaacgtactgggacaactgtaaccgttgcacctgccaggagaacaggcagtggcagtgtgaccaagaaccatgcctggtggatccagacatgatcaaagccatcaaccagggcaactatggctggcaggctgggaaccacagcgccttctggggcatgaccctggatgagggcattcgctaccgcctgggcaccatccgcccatcttcctcggtcatgaacatgcatgaaatttatacagtgctgaacccaggggaggtgcttcccacagccttcgaggcctctgagaagtggcccaacctgattcatgagcctcttgaccaaggcaactgtgcaggctcctgggccttctccacagcagctgtggcatccgatcgtgtctcaatccattctctgggacacatgacgcctgtcctgtcgccccagaacctgctgtcttgtgacacccaccagcagcagggctgccgcggtgggcgtctcgatggtgcctggtggttcctgcgtcgccgaggggtggtgtctgaccactgctaccccttctcgggccgtgaacgagacgaggctggccctgcgcccccctgtatgatgcacagccgagccatgggtcggggcaagcgccaggccactgcccactgccccaacagctatgttaataacaatgacatctaccaggtcactcctgtctaccgcctcggctccaacgacaaggagatcatgaaggagctgatggagaatggccctgtccaagccctcatggaggtgcatgaggacttcttcctatacaagggaggcatctacagccacacgccagtgagccttgggaggccagagagataccgccggcatgggacccactcagtcaagatcacaggatggggagaggagacgctgccagatggaaggacgctcaaatactggactgcggccaactcctggggcccagcctggggcgagaggggccacttccgcatcgtgcgcggcgtcaatgagtgcgacatcgagagcttcgtgctgggcgtctggggccgcgtgggcatggaggacatgggtcatcactgaggctgcgggcaccacgcggggtccggcctgggatccaggctaagggccggcggaagaggccccaatggggcggtgaccccagcctcgcccgacagagcccggggcgcaggcgggcgccagggcgctaatcccggcgcgggttccgctgacgcagcgccccgcctgggagccgcgggcaggcgagactggcggagcccccagacctcccagtggggacggggcagggcctggcctgggaagagcacagctgcagatcccaggcctctggcgcccccactcaagactaccaaagccaggacacctcaagtctccagccccactaccccaccccactcctgtattcttttttttttttttttagacagggtcttgctccgttgcccaggttggagtgcagtggcccatcagggctcactgtaacctccgactcctgggttcaagtgaccctcccacctcagcctctcaagtagctgggactacaggtgcaccaccacacctggctaatttttgtattttttgtaaagaggggggtctcactgtgttgcccaggctggtctcgaactcctgggctcaagcggtccacctgcctccgcctcccaaagtgctgggattgcaggcatgagccactgcacccagccctgtattcttattcttcagatatttatttttcttttcactgttttaaaataaaaccaaagtattgataaaaaaaaaaaaaaaaa

SEQ ID NO: 92 - DNA, 735 bp, Homo sapiens
atggccgcgcccagtgatggattcaagcctcgtgaacgaagcggtggggagcaggcacaggactgggatgctctgccacccaagcggccccgactaggggcaggaaacaagatcggaggccgtaggcttattgtggtgctggaaggggccagtctggagacagtcaaggtagggaagacatatgagctactcaactgtgacaagcacaagtctatattgttgaagaatggacgggaccctggggaagcgcggccagatatcacccaccagagtttgctgatgctgatggatagtcccctgaaccgagctggcttgctacaggtttatatccatacacagaagaatgttctgattgaagtgaatccccagacccgaattcccagaacctttgaccgcttttgtggcctcatggttcaacttttacacaagctcagtgttcgagcagctgatggcccccagaagcttttgaaggtaattaagaatccagtatcagatcactttccagttggatgtatgaaagttggcacttctttttccatcccggttgtcagtgatgtgcgtgagctggtgcccagcagtgatcctattgtttttgtggtaggggcctttgcccatggcaaggtcagtgtggagtatacagagaagatggtgtccatcagtaactaccccctttctgctgccctcacctgtgcaaaacttaccacagcctttgaggaagtatggggggtcatttga

SEQ ID NO: 93 - DNA, 4287 bp, Homo sapiens
gtgcgggacgcgctgcagctggagaggaaaggcagagcgaggaggggcgaggccaagaaagcgcgcgtttctgggaggggaggagcctggctaaggagcgccgcgtcacatccggtagagttagagcccgtgcggaggcggtgcggagcatttcggctctgagcggctgggcgaccggcgcgtcgtgcggggctgcggcggagcctccttaaggaaggtgcaagaggttggcagcttcgattgaagcacatcgaccggcgacagcagccaggagtcatgagcgacagcggcgagcagaactacggcgagcgggaatcccgttctgcttccagaagtggaagtgctcacggatcggggaaatctgcaaggcatacccctgcaaggtctcgctccaaggaagattccaggcgttccagatcaaagtccaggtcccgatctgaatctaggtctagatccagaagaagctcccgaaggcattatacccggtcacggtctcgctcccgctcccatagacgatcacgtagcaggtcttacagtcgagattatcgtagacggcacagccacagccattctcccatgtctactcgcaggcgtcatgttgggaatcgggcaaatcctgatcctaactgttgtcttggagtatttgggctgagcttgtacaccacagaaagagatctaagagaagtgttctctaaatatggtcccattgccgatgtgtctattgtatatgaccagcagtctaggcgttcaagaggatttgcctttgtatattttgaaaatgtagatgatgccaaggaagctaaagaacgtgccaatggaatggagcttgatgggcgtaggatcagagttgatttctctataacaaaaagaccacatacgccaacaccaggaatttacatggggagacctacctatggcagctctcgccgtcgggattactatgacagaggatatgatcggggctatgatgatcgggactactatagcagatcatacagaggaggaggtggaggaggaggaggatggagagctgcccaagacagggatcagatttatagaaggcggtcaccttctccttactatagtcgtggaggatacagatcacgttccagatctcgatcatactcacctcgtcgctattaaagcatgaagactttctgaaacctgccctagagctgggatattgtttgtgggcaatattttttattgtctcttgtttaaaaagtgaacagtgcctagtgaagttaggtgacttttacaccttttacgatgactacttttggtggagttgaaatgctgttttcattctgcatttgtgtagtttggtgctttgttccaagttaagtgttttcagaaaagtatgttttgcatgtatttttttacagtctaaattttgactgctgagaagtttctattgtacaaaacttcatttaaaaggtttttctactgaatccagggtattctgaagatcgaagcctgtgtaaaatgctaccaaatggcaaaaagcaacaataaacagtttgatttttacttttctttctaacatatcaatgcttagcagaactattcagattgtcagtagtaaatttaaagacaaatgcccgttttcctccagtccatgaaacataccatacttatatacctgcaactaagtgtttaaaattatgctctgtaactctgtactgctagtattagaactaaaaatcttaaaatacagccagtgcttaatgcttatatcaatgtggatttgtcggcttttatgtaatctgtaatatgtatagcaggaaatacgaagagttacacagtgtatgccttaaaaggctgtttcttaaaggtgttacaaggggataatggtatttcaactagttatcagcaagtgacaatacattccaccacaaatacactcttgttcttctagcttttagactatatgaaaaaaccgggtgcttcaaagtacatgataagggaacactatacctgtcatggatgaactgaagactttgcctgttcattttttaaatattattttcaggtcctttgcttaccaaaggaggcccaatttcactcaaatgttttgagaactgtgtttaaataaacgcaaatgaaaagaaaaatgttggtgcagctgttcacaaagaagtgttcttgttctattataattagagttcttctgtagtttaatcgttagggcagtgtgttccttgggctgaggtgtatctttgctattttgggctgggttgagggggggatgaatttctgtattcctggaaaattcagagtgcataactaggtattagagtgatctccatttggggatggagttacagtaaataactagactgcgggtactttaatacatgttcttattattttgcatttaagtaattttcatgaccaattgtagggatgttgctacaggtgggttattttgttgccttgctaacctttatcgcatctaggtattagtatgtttcaggtactttgggaagaactttacatataatctttagcaatgaaatgatgtagagtaacttaccttagttcaaatagctgtttaagtggcaatgccacgatctgaattgaacctaggtgatcttagtccacagttctcttgatcatgatgtctcaaatctgggtacctgggtgatggaaaataccagtaatggagcataggcagtattggcaggtcttaatttgtaaaacttactgtccagggtgttttcagtgtttgccaacttgtggtaaattaatatgcttagagaactacccttaggtttgtttctgataagcatgtggaaacaacttagtatatgcctgatgggttatttcaaattgttctcaatgagttttgaaacaagaatttgtagtatttatatataaagttgagttttagggtgtggtcccagagggggttgtgttatggatggatacattaaaggctgagaaacctggttttatcgtggtagtatatacaggcatcctttcctgaagtaactacattctccaccattttctccccaaccaaacctctccccatcagttaactgatggcttgcgagttcacactcctgataatctcgaacataaccctcggtttctatcctaaagcctgagttttagccctttagttgtgtagccatcctttatcctgctgattgaaagtttccttttttaggctagtttgagttgttttctggcttttagatttgaaagaattttagccatttgacatggctacaaagagtgttaacaggcaaaagactgaggaaaatttggaattttaccaagttgagatagactgagaagtagtgagacaaagtggtagtcttttgatgtgctgtaatgctagtcgccagtttcatgaaagggaggcagcagttacccgtaggtaacccctaggtaactgctgccatgggcagctgaatcagacaaaagccatgggaaaggataaatttgagtcttaaagttactgcctcaaggcaaagggacttggaggcttttatatgccaatacaaacaatccatttcttatagctgtagggctgagactactaaaaccaaatgtaaagttcatttggaagattgctaagttaaatagttttatactaggcttttgtgaaacttctcaggaaatcaacagggtcccagcaagtggaaataaggctgtgtcaaaagatttgtagacctgggagcaggggtttccgatctcctggccatggattgcctgagctccgccgcctgtcagatcagcaacagcagattttcatagcaggaatcctattgtgaagtgcgcttgagagggatctagcttgcacatttccttatggaaatctaactacatgttagagaatgctcaaggtctgcaatgtttacattgttgcccctacataaggaatatatgccttaagataaaactaatagctcttagccctcttacaccattgactaggattccaattctgcaaggcccaggaggagaaattgagaattagaagttccgagaagaaataaaaagatttggtttgcattatcaaaatttctgtaaattatatggaaattttgaggatggattaggctggatttattagcagtggacacgcctccaatattccttcagcatgccatctcagtggattttgattggctcttgtaggattggacttaatgctagcttatgccaaatgtcatcaaaaagccagaatgctactacagtaatgtaaaggattattgtatatagtgtaaaggattattatgtgtaatctttaatatataatgtaaagacttaaaa

SEQ ID NO: 94 - DNA, 1452 bp, Homo sapiens
atgaaggaagagaaggagcacaggcctaaggagaagcgagtaaccctgttaacccccgccggggccacaggcagcggtggtgggacctcgggggacagctccaagggggaagataagcaggatcgcaacaaggagaagaaagaagcgctgagcaaggtggtaattcgaagattacctcccactttgaccaaggagcagcttcaggaacatcttcaacctatgcctgagcatgattattttgagtttttttctaatgatacgagtttgtatcctcatatgtatgccagagcatacatcaactttaaaaaccaagaggacattattttgttcagggatcgctttgatggttatgtattccttgacaataaaggtcaggaatatcccgctatagtagaatttgcaccttttcaaaaagctgcaaaaaagaagactaagaaaagagataccaaagtcgggactatcgatgatgatccagaatatagaaagtttttggaaagttatgccacagataatgagaaaatgacatctactccagagacactgctagaggaaatagaagcaaaaaatagagaattaatagctaaaaagacaaccccacttttgagcttcctgaaaaacaagcagagaatgagagaagaaaagagagaagaaaggaggaggagagaaatagaaagaaaaagacaaagagaagaagagaggaggaaatggaaagaagaagagaaacgaaaaaggaaagatatagaaaagctaaagaagatagacagaattccagaaagggacaaattaaaggatgaaccaaagattaaggtacacaggtttctgttacaagctgtgaatcagaaaaatctgctcaagaagccagaaaaaggagatgaaaaagaattggacaaaagagaaaaagccaagaaattggacaaagagaatctcagtgatgaaagagccagtgggcaaagttgtacattgcccaagcgttctgatagcgaacttaaagatgaaaaaccaaagagacctgaagatgagagcggcagagactatagggagagggaacgggaatatgaacgagatcaggagcgcatacttcgagaaagagagaggctgaagcggcaagaagaagagcgccgtaggcagaaggagcgctatgagaaagagaagacttttaagagaaaagaagaagaaatgaaaaaagagaaagacacacttcgggataaaggaaagaaggctgaaagtacagaatcaataggcagctcagaaaaaactgaaaagaaagaagaagtggtcaagagagatcgaataagaaacaaggatcgtccagcgatgcagctttaccaaccaggagctcgaagccgaaatcgactctgtccccctgatgacagcaccaagtctggagattcagcagcagaaaggaagcaggaaagtggtattagccatagaaaagaaggaggagaggagtga

SEQ ID NO: 95 - DNA, 579 bp, Homo sapiens
tctttcttttcgccatcttttgtctttccgtggagctgtcgccatgaaggtcgagctgtgcagttttagcgggtacaagatctaccccggacacgggaggcgctacgccaggaccgacgggaaggttttccagtttcttaatgcgaaatgcgagtcggctttcctttccaagaggaatcctcggcagataaactggactgtcctctacagaaggaagcacaaaaagggacagtcggaagaaattcaaaagaaaagaacccgccgagcagtcaaattccagagggccattactggtgcatctcttgctgatataatggccaagaggaatcagaaacctgaagttagaaaggctcaacgagaacaagctatcagggctgctaaggaagcaaaaaaggctaagcaagcatctaaaaagactgcaatggctgctgctaaggcacctacaaaggcagcacctaagcaaaagattgtgaagcctgtgaaagtttcagctccccgagttggtggaaaacgctaaactggcagattagatttttaaataaagattggattataactctagaaaaaaaaaaaaaaaaa

SEQ ID NO: 96 - DNA, 1086 bp, Homo sapiens
atggcctctctactcgccaaggacgcctacctgcagagcctggccaagaagatctgctcccattcggccccggaacagcaggcgcgcacgcgggctggcaaaactcaaggctcagaaactgcagggcccccaaaaaagaaaaggaagaaaacacaaaagaaattccggaagcgagaagagaaggctgctgagcacaaggccaagtccttgggggagaaatctccagcagcctctggggccaggaggcctgaggcagccaaagaggaagcagcttgggcttccagctcagcagggaaccctgcagatggcctggccactgagcctgagtctgtctttgctctggatgttctgcgacagcgactgcatgagaagatccaggaggcccggggccagggcagtgccaaggagctgtcccctgccgccttggagaaaaggcggcggagaaagcaggaacgggaccggaagaagaggaagcgaaaggagctgcgggcgaaagagaaggccaggaaggctgaggaggccacggaggcccaggaggtggtggaggcaaccccagagggggcctgcacggagccgcgggagccgcccgggctgatcttcaataaggtggaggtgagcgaagacgagccggccagcaaggcgcagcgcagaaaagagaagaggcagagggtgaaggggaacctcacgccgctgaccgggaggaactaccggcagctgctggagcgcctgcaggcacggcagagccggctggacgagctgcgcggccaggatgaggggaaggcgcaggagctggaggcgaagatgaagtggaccaacctcctctacaaggcggagggcgtgaagatccgtgacgacgaacgcctgctgcaggaggccctgaagcgcaaggagaagcgcagggcgcagcggcagcgccggtgggagaagcgcacggccggcgtggtggagaagatgcagcagcgccaggaccggcggcggcagaacctgcgcaggaagaaggcggcccgcgccgagcgccgcctgctcagagcccgcaagaagggccgcatcctgccgcaggacctggagcgcgcaggcctggtctga

SEQ ID NO: 97 - DNA, 990 bp, homo sapiens
atggcggaggctgcaactcccggaacaacagccacaacatcaggagcaggagcggcagcggcgacggcggcagcagcctcccccaccccgatccccacagtcaccgccccgtccctgggggcgggcggagggggcggcggcagcgacggcagcggcggcggctggactaaacaggtcacctgcaggtattttatgcatggggtttgtaaggaaggagacaactgtcgctactcgcatgacctctctgacagtccgtatagtgtagtgtgcaagtattttcagcgagggtactgtatttatggagaccgctgcagatatgaacatagcaaaccattgaaacaggaagaagcaactgctacagagctaactacaaagtcatcccttgctgcttcctcaagtctctcatcgatagttggaccacttgttgaaatgaatacaggcgaagctgagtcaagaaattcaaactttgcaactgtaggagcaggttcagaggactgggtgaatgctattgagtttgttcctgggcaaccctactgtggccgtactgcgccttcctgcactgaagcacccctgcagggctcagtgaccaaggaagaatcagagaaagagcaaaccgccgtggagacaaagaagcagctgtgcccctatgctgcagtgggagagtgccgatacggggagaactgtgtgtatctccacggagattcttgtgacatgtgtgggctgcaggtcctgcatccaatggatgctgcccagagatcgcagcatatcaaatcgtgcattgaggcccatgagaaggacatggagctctcatttgccgtgcagcgcagcaaggacatggtgtgtgggatctgcatggaggtggtctatgagaaagccaaccccagtgagcgccgcttcgggatcctctccaactgcaaccacacctactgtctcaagtgcattcgcaagtggaggagtgctaagcaatttgagagcaagatcataaagtga

SEQ ID NO: 98 - DNA, 594 bp, Homo sapiens
atgggaaaccacgcaggcaaacgagaattaaatgccgagaaggccagtacgaatagtgaaactaacagaggagaatctgaaaaaaagagaaacctgggtgaactttcacggacaacctcagaggacaacgaagtgttcggagaggcagatgcgaaccagaacaatgggacctcctctcaggacacagcggtgactgactccaagcgcacagcggacccgaagaatgcctggcaggatgcccacccagctgacccagggagccgcccccacttgatccgcctcttttcccgagatgccccggggagggaggacaacaccttcaaagacaggccctctgagtccgacgagctccagaccatccaagaagacagtgcagccacctccgagagcctggatgtgatggcgtcacagaagagaccctcccagaggcacggatccaagtacctggccacagcaagtaccatggaccatgccaggcatggcttcctcccaaggcacagagacacgggcatccttgactccatcgggcgcttctttggcggtgacaggggtgcgcccaagcggggctctggcaaggtgagctctgaggagtag

SEQ ID NO: 99 - DNA, 2577 bp, Homo sapiens
atggtgaacttcacggtagaccagatccgcgccatcatggacaagaaggccaacatccgcaacatgtctgtcatcgcccacgtggaccatggcaagtccacgctgacagactccctggtgtgcaaggcgggcatcatcgcctcggcccgggccggggagacacgcttcactgatacccggaaggacgagcaggagcgttgcatcaccatcaagtcaactgccatctccctcttctacgagctctcggagaatgacttgaacttcatcaagcagagcaaggacggtgccggcttcctcatcaacctcattgactcccccgggcatgtcgacttctcctcggaggtgactgctgccctccgagtcaccgatggcgcattggtggtggtggactgcgtgtcaggcgtgtgcgtgcagacggagacagtgctgcggcaggccattgccgagcgcatcaagcctgtgctgatgatgaacaagatggaccgcgccctgctggagctgcagctggagcccgaggagctctaccagactttccagcgcatcgtggagaacgtgaacgtcatcatctccacctacggcgagggcgagagcggccccatgggcaacatcatgatcgatcctgtcctcggtaccgtgggctttgggtctggcctccacgggtgggccttcaccctgaagcagtttgccgagatgtatgtggccaagttcgccgccaagggggagggccagttggggcctgccgagcgggccaagaaagtagaggacatgatgaagaagctgtggggtgacaggtactttgacccagccaacggcaagttcagcaagtcagccaccagccccgaagggaagaagctgccacgcaccttctgccagctgatcctggaccccatcttcaaggtgtttgatgcgatcatgaatttcaagaaagaggagacagcaaaactgatagagaaactggacatcaaactggacagcgaggacaaggacaaagaaggcaaacccctgctgaaggctgtgatgcgccgctggctgcctgccggagacgccttgttgcagatgatcaccatccacctgccctcccctgtgacggcccagaagtaccgctgcgagctcctgtacgaggggcccccggacgacgaggctgccatgggcattaaaagctgtgaccccaaaggccctcttatgatgtatatttccaaaatggtgccaacctccgacaaaggtcggttctacgcctttggacgagtcttctcggggctggtctccactggcctgaaggtcaggatcatggggcccaactatacccctgggaagaaggaggacctctacctgaagccaatccagagaacaatcttgatgatgggccgctacgtggagcccatcgaggatgtgccttgtgggaacattgtgggcctcgtgggcgtggaccagttcctggtgaagacgggcaccatcaccaccttcgagcacgcgcacaacatgcgggtgatgaagttcagcgtcagccctgttgtcagagtggccgtggaggccaagaacccggctgacctgcccaagctggtggaggggctgaagcggctggccaagtccgaccccatggtgcagtgcatcatcgaggagtcgggagagcatatcatcgcgggcgccggcgagctgcacctggagatctgcctgaaggacctggaggaggaccacgcctgcatccccatcaagaaatctgacccggtcgtctcgtaccgcgagacggtcagtgaagagtcgaacgtgctctgcctctccaagtcccccaacaagcacaaccggctgtacatgaaggcgcggcccttccccgacggcctggccgaggacatcgataaaggcgaggtgtccgcccgtcaggagctcaagcagcgggcgcgctacctggccgagaagtacgagtgggacgtggctgaggcccgcaagatctggtgctttgggcccgacggcaccggccccaacatcctcaccgacatcaccaagggtgtgcagtacctcaacgagatcaaggacagtgtggtggccggcttccagtgggccaccaaggagggcgcactgtgtgaggagaacatgcggggtgtgcgcttcgacgtccacgacgtcaccctgcacgccgacgccatccaccgcggagggggccagatcatccccacagcacggcgctgcctctatgccagtgtgctgaccgcccagccacgcctcatggagcccatctaccttgtggagatccagtgtccagagcaggtggtcggtggcatctacggggttttgaacaggaagcggggccacgtgttcgaggagtcccaggtggccggcacccccatgtttgtggtcaaggcctatctgcccgtcaacgagtcctttggcttcaccgctgacctgaggtccaacacgggcggccaggcgttcccccagtgtgtgtttgaccactggcagatcctgcccggagaccccttcgacaacagcagccgccccagccaggtggtggcggagacccgcaagcgcaagggcctgaaagaaggcatccctgccctggacaacttcctggacaaattgtag

SEQ ID NO: 100 - DNA, 783 bp, Homo sapiens
atggcggggtcgccgctgctctgggggccgcgggccgggggcgtcggccttttggtgctgctgctgctcggcctgtttcggccgccccccgcgctctgcgcgcggccggtaaaggagccccgcggcctaagcgcagcgtctccgcccttggctgagactggcgctcctcgccgcttccggcggtcagtgccccgaggtgaggcggcgggggcggtgcaggagctggcgcgggcgctggcgcatctgctggaggccgaacgtcaggagcgggcgcgggccgaggcgcaggaggctgaggatcagcaggcgcgcgtcctggcgcagctgctgcgcgtctggggcgccccccgcaactctgatccggctctgggcctggacgacgaccccgacgcgcctgcagcgcagctcgctcgcgctctgctccgcgcccgccttgaccctgccgccctcgcagcccagcttgtccccgcgcccgtccccgccgcggcgctccgaccccggcccccggtctacgacgacggccccgcgggcccggatgctgaggaggcaggcgacgagacacccgacgtggaccccgagctgttgaggtacttgctgggacggattcttgcgggaagcgcggactccgagggggtggcagccccgcgccgcctccgccgtgccgccgaccacgatgtgggctctgagctgccccctgagggcgtgctgggggcgctgctgcgtgtgaaacgcctagagaccccggcgccccaggtgcctgcacgccgcctcttgccaccctga

SEQ ID NO: 101 - DNA, 1447 bp, Homo sapiens; identical to SEQ ID NO: 11
  misc_feature (1381)..(1381): n is a, c, g, or t
  misc_feature (1427)..(1427): n is a, c, g, or t

SEQ ID NO: 102 - DNA, 1189 bp, Homo sapiens; identical to SEQ ID NO: 12
  misc_feature (899)..(899): n is a, c, g, or t
  misc_feature (916)..(916): n is a, c, g, or t
  misc_feature (919)..(919): n is a, c, g, or t
  misc_feature (921)..(921): n is a, c, g, or t
  misc_feature (954)..(954): n is a, c, g, or t
  misc_feature (956)..(956): n is a, c, g, or t
  misc_feature (978)..(978): n is a, c, g, or t
  misc_feature (995)..(995): n is a, c, g, or t
  misc_feature (1013)..(1013): n is a, c, g, or t
  misc_feature (1015)..(1015): n is a, c, g, or t
  misc_feature (1018)..(1018): n is a, c, g, or t
  misc_feature (1021)..(1021): n is a, c, g, or t
  misc_feature (1032)..(1032): n is a, c, g, or t
  misc_feature (1056)..(1056): n is a, c, g, or t
  misc_feature (1080)..(1080): n is a, c, g, or t
  misc_feature (1087)..(1087): n is a, c, g, or t
  misc_feature (1109)..(1109): n is a, c, g, or t
  misc_feature (1121)..(1121): n is a, c, g, or t
  misc_feature (1130)..(1130): n is a, c, g, or t
  misc_feature (1132)..(1132): n is a, c, g, or t
  misc_feature (1138)..(1138): n is a, c, g, or t
  misc_feature (1141)..(1141): n is a, c, g, or t
  misc_feature (1144)..(1144): n is a, c, g, or t
  misc_feature (1153)..(1153): n is a, c, g, or t
  misc_feature (1160)..(1160): n is a, c, g, or t
  misc_feature (1171)..(1172): n is a, c, g, or t
  misc_feature (1174)..(1174): n is a, c, g, or t
  misc_feature (1182)..(1182): n is a, c, g, or t
  misc_feature (1186)..(1186): n is a, c, g, or t
  misc_feature (1188)..(1189): n is a, c, g, or t

SEQ ID NO: 103 - DNA, 853 bp, Homo sapiens; identical to SEQ ID NO: 13
  misc_feature (2)..(2): n is a, c, g, or t
  misc_feature (322)..(322): n is a, c, g, or t
  misc_feature (548)..(548): n is a, c, g, or t
  misc_feature (712)..(712): n is a, c, g, or t
  misc_feature (719)..(719): n is a, c, g, or t
  misc_feature (724)..(724): n is a, c, g, or t
  misc_feature (778)..(778): n is a, c, g, or t
  misc_feature (780)..(780): n is a, c, g, or t
  misc_feature (794)..(794): n is a, c, g, or t
  misc_feature (804)..(804): n is a, c, g, or t
  misc_feature (806)..(806): n is a, c, g, or t
  misc_feature (811)..(812): n is a, c, g, or t
  misc_feature (814)..(814): n is a, c, g, or t
  misc_feature (816)..(817): n is a, c, g, or t
  misc_feature (820)..(820): n is a, c, g, or t
  misc_feature (822)..(823): n is a, c, g, or t
  misc_feature (825)..(825): n is a, c, g, or t
  misc_feature (828)..(828): n is a, c, g, or t
  misc_feature (830)..(831): n is a, c, g, or t
  misc_feature (833)..(833): n is a, c, g, or t
  misc_feature (839)..(839): n is a, c, g, or t
  misc_feature (845)..(845): n is a, c, g, or t
  misc_feature (848)..(848): n is a, c, g, or t

SEQ ID NO: 104 - DNA, 4207 bp, Homo sapiens
gcggggtgaccatggaggaagaagatgagtctcgagggaagacagaggagtcgggggaggatcggggcgatggtccgccagacagagaccccacgctttctccttctgcctttatcctgcgagccatccagcaggctgtgggaagctccctgcagggggacctgcccaatgataaagatggctctcggtgtcatggccttcgatggcggcgctgccggagtccacggtcagagccccgttcccaggaatcagggggcactgacacggctactgtgttggacatggccacggacagcttcctcgcagggctggtgagtgtcctggatcccccggatacctgggttcccagccgcctggacctgcggcctggcgaaagtgaggacatgctggagctggtggctgaggtccgaatcggggacagagatcccatccctctgcctgtgcccagcctgctgccccgtctcagggcctggaggacgggcaaaacggtttctccacagtcgaactcctctaggcccacctgtgcccgtcacctcaccttgggcacgggagacgggggccctgccccaccccctgccccctcctctgcatcctcctccccttccccttctccctcatcttcctccccttcccctcccccacccccaccgccccctgcacccccagccccacctgccccccgattcgatatctatgaccccttccaccccaccgacgaggcctactctccaccgcctgctccggagcaaaagtacgacccttttgagcccaccggctccaaccccagctcatcagcggggaccccctcacctgaggaggaagaggaggaggaagaggaagaagaagaggaagaggaagacgaggaggaggaggaaggcctgtcccagagcatcagccgcatctcggagaccctggcgggcatctacgatgacaacagcctgagccaggacttcccaggtgacgagagcccccgcccggacgcgcagcccacacagccgactcccgcccctggaacgccgccccaggtggactccacccgggctgatggagccatgcgccggcgggtcttcgtggtggggaccgaggcagaggcttgtcgggaaggcaaggtctcggtggaggtggtgaccgctggtggagccgccctcccgccgcccctgctgccgcccggcgactcggagatcgaggaaggggagatcgtccagccggaggaggagcccaggctggcgctgtccctcttccgccccggcggccgggccgcccggcctccaccggccgcctcggccacccccacggcccagccccttcctcagcctcccgctccgcgggcccccgagggggacgacttcttgtccctgcatgcggagtcggacggcgagggcgccctgcaggtggacctaggggagccggctcccgcgccgcccgccgccgactcgcgctggggcggcctggacctgcgccgcaagatcctgacccaacggcgggagcgctaccgccagcgctcgccctccccggcgcccgcgcccgccccggccgccgctgctggtccgcccacgcgcaagaagtccaggcgggaacgcaagcgcagcggcgaggccaaggaggccgcctcgtcctcgtcgggcacccagccagcgccgcccgccccggcctcgccctgggactccaagaagcaccgctcgcgggaccgcaagcccggctcccacgcctcgtcgtccgcccgccgccgctcccgctcccgctcccgctcccgctccacccgccgccgctcgcgcagcaccgaccgccgccgcgggggcagccgcaggtcgcggtcccgggagaagcggcgacggcggcggcgctccgcctccccgcccccggccacttcctcatcgtcgtcctcgaggcgcgagcggcaccgcgggaaacaccgggacggtggcggcagcaagaagaagaagaagcggtcgcggtcccggggtgagaagcggtctggggatggcagcgagaaggccccggcgcccgccccgccgccctctggctccacctcgtgtggtgaccgcgacagccgccgccggggggccgtgccaccctccatccaggacctcacggaccacgacctcttcgccatcaagcggaccatcacggtgggccggcttgacaagtccgacccccgaggaccctctcctgctccggcctcctcacctaagcgggaggtcctgtacgactccgagggactgagcggcgaggagcggggcggcaagagcagccagaaggatcggcgccgctcgggggccgcctcctcctcctcctcttcccgggagaaggggtctcgtcggaaggcgctggacgggggtgaccgggatcgggacagggacagagatagggacagggacaggtcatccaagaaggcccggccccccaaggagtcggcgccttcctcagggcccccgccaaagccaccagtcagcagcggctcaggctcttcatcctcgtcgtcctcctgttcttcccggaaggtgaagctgcagtccaaggtggcggtgctgatccgcgagggtgtcagcagcaccaccccggccaaggatgccgcgtcagccggcctgggctccattggcgtcaaattcagccgtgaccgcgagagtcgctcccccttcctcaaacctgacgagcgggcccccactgagatggccaaagcagctccgggcagcaccaagcccaaaaagaccaaggtcaaggccaaggcaggggccaagaaaaccaaggggaccaagggaaagaccaagccatccaagaccaggaaaaaggtccgcagtggaggtggcagcgggggcagtggtggccaggtgtcgctgaagaagtccaaggcggatagctgcagccaggcggcaggcaccaagggggcggaggagacttcctggtccggggaggagcgggcagccaaggttcctagcaccccgccccccaaggcagccccaccaccccctgccctcactccggactcgcagaccgtggacagcagctgcaagacacctgaggtctccttcctgcccgaggaggccactgaggaggctggggtccgaggtggggcggaggaggaggaggaggaagaagaagaggaggaggaagaggaagaggaggaggagcagcagcctgctaccaccacggccaccagcactgctgcagccgccccaagcactgcccccagcgcggggtccacagccggtgactcgggggcggaggacgggccagcttcccgtgtctcccagctgcccacgctgcccccgcccatgccctggaatctgccagctggtgtggactgcaccaccagcggcgtcctggccttgactgcacttctcttcaagatggaagaagccaacctggcgagccgagcgaaggcccaggagctgatccaggccaccaaccagatcctcagccacagaaagccaccctcaagtctggggatgaccccagctcctgtgcccacctctttgggtctgccccctggcccctccagctacctgcttcctggcagcctccctctggggggctgcggttcgaccccccccacccccaccgggctggctgccacgtctgacaagagagagggcagcagcagctctgagggccgtggggacacagataagtatctgaagaagctgcacacgcaggagcgggcggtggaggaggtgaagctggccatcaagccatactatcagaagaaggacatcaccaaggaggagtacaaggacatcctgaggaaggccgtccacaagatctgccacagcaaaagtggggaaatcaacccagtgaaggtgagcaacctggtgcgggcctacgtccagcgctaccgctacttccgcaagcacggtcgcaagccaggggaccccccagggcccccacggccgcccaaggagccagggcccccagacaagggtggcccgggcctgcccctgccccctctctgagagccctggccagctcttcgcccctcacctctttgaaactctggacgtatttatggctccacctccccacctccctcccccgtcagtgggatgactgggggagggttgctgcagggaagaggagagccccctgccctgccctgccccgtgtccacctcccttgcccccaagcctgtccccagtgcccctcccttctgtttgtgcccctctccccaatttcattaaagatttcatgaaacattaaaaaaaaaaaaaaa

SEQ ID NO: 105 - DNA, 10719 bp, Homo sapiens
tggagacagaatggaggtgctgccggactcggaaatggggtccaagggtagccaaggatggctgcagcttcatatgatcagttgttaaagcaagttgaggcactgaagatggagaactcaaatcttcgacaagagctagaagataattccaatcatcttacaaaactggaaactgaggcatctaatatgaaggaagtacttaaacaactacaaggaagtattgaagatgaagctatggcttcttctggacagattgatttattagagcgtcttaaagagcttaacttagatagcagtaatttccctggagtaaaactgcggtcaaaaatgtccctccgttcttatggaagccgggaaggatctgtatcaagccgttctggagagtgcagtcctgttcctatgggttcatttccaagaagagggtttgtaaatggaagcagagaaagtactggatatttagaagaacttgagaaagagaggtcattgcttcttgctgatcttgacaaagaagaaaaggaaaaagactggtattacgctcaacttcagaatctcactaaaagaatagatagtcttcctttaactgaaaatttttccttacaaacagatatgaccagaaggcaattggaatatgaagcaaggcaaatcagagttgcgatggaagaacaactaggtacctgccaggatatggaaaaacgagcacagcgaagaatagccagaattcagcaaatcgaaaaggacatacttcgtatacgacagcttttacagtcccaagcaacagaagcagagaggtcatctcagaacaagcatgaaaccggctcacatgatgctgagcggcagaatgaaggtcaaggagtgggagaaatcaacatggcaacttctggtaatggtcagggttcaactacacgaatggaccatgaaacagccagtgttttgagttctagtagcacacactctgcacctcgaaggctgacaagtcatctgggaaccaaggtggaaatggtgtattcattgttgtcaatgcttggtactcatgataaggatgatatgtcgcgaactttgctagctatgtctagctcccaagacagctgtatatccatgcgacagtctggatgtcttcctctcctcatccagcttttacatggcaatgacaaagactctgtattgttgggaaattcccggggcagtaaagaggctcgggccagggccagtgcagcactccacaacatcattcactcacagcctgatgacaagagaggcaggcgtgaaatccgagtccttcatcttttggaacagatacgcgcttactgtgaaacctgttgggagtggcaggaagctcatgaaccaggcatggaccaggacaaaaatccaatgccagctcctgttgaacatcagatctgtcctgctgtgtgtgttctaatgaaactttcatttgatgaagagcatagacatgcaatgaatgaactagggggactacaggccattgcagaattattgcaagtggactgtgaaatgtatgggcttactaatgaccactacagtattacactaagacgatatgctggaatggctttgacaaacttgacttttggagatgtagccaacaaggctacgctatgctctatgaaaggctgcatgagagcacttgtggcccaactaaaatctgaaagtgaagacttacagcaggttattgcgagtgttttgaggaatttgtcttggcgagcagatgtaaatagtaaaaagacgttgcgagaagttggaagtgtgaaagcattgatggaatgtgctttagaagttaaaaaggaatcaaccctcaaaagcgtattgagtgccttatggaatttgtcagcacattgcactgagaataaagctgatatatgtgctgtagatggtgcacttgcatttttggttggcactcttacttaccggagccagacaaacactttagccattattgaaagtggaggtgggatattacggaatgtgtccagcttgatagctacaaatgaggaccacaggcaaatcctaagagagaacaactgtctacaaactttattacaacacttaaaatctcatagtttgacaatagtcagtaatgcatgtggaactttgtggaatctctcagcaagaaatcctaaagaccaggaagcattatgggacatgggggcagttagcatgctcaagaacctcattcattcaaagcacaaaatgattgctatgggaagtgctgcagctttaaggaatctcatggcaaataggcctgcgaagtacaaggatgccaatattatgtctcctggctcaagcttgccatctcttcatgttaggaaacaaaaagccctagaagcagaattagatgctcagcacttatcagaaacttttgacaatatagacaatttaagtcccaaggcatctcatcgtagtaagcagagacacaagcaaagtctctatggtgattatgtttttgacaccaatcgacatgatgataataggtcagacaattttaatactggcaacatgactgtcctttcaccatatttgaatactacagtgttacccagctcctcttcatcaagaggaagcttagatagttctcgttctgaaaaagatagaagtttggagagagaacgcggaattggtctaggcaactaccatccagcaacagaaaatccaggaacttcttcaaagcgaggtttgcagatctccaccactgcagcccagattgccaaagtcatggaagaagtgtcagccattcatacctctcaggaagacagaagttctgggtctaccactgaattacattgtgtgacagatgagagaaatgcacttagaagaagctctgctgcccatacacattcaaacacttacaatttcactaagtcggaaaattcaaataggacatgttctatgccttatgccaaattagaatacaagagatcttcaaatgatagtttaaatagtgtcagtagtagtgatggttatggtaaaagaggtcaaatgaaaccctcgattgaatcctattctgaagatgatgaaagtaagttttgcagttatggtcaatacccagccgacctagcccataaaatacatagtgcaaatcatatggatgataatgatggagaactagatacaccaataaattatagtcttaaatattcagatgagcagttgaactctggaaggcaaagtccttcacagaatgaaagatgggcaagacccaaacacataatagaagatgaaataaaacaaagtgagcaaagacaatcaaggaatcaaagtacaacttatcctgtttatactgagagcactgatgataaacacctcaagttccaaccacattttggacagcaggaatgtgtttctccatacaggtcacggggagccaatggttcagaaacaaatcgagtgggttctaatcatggaattaatcaaaatgtaagccagtctttgtgtcaagaagatgactatgaagatgataagcctaccaattatagtgaacgttactctgaagaagaacagcatgaagaagaagagagaccaacaaattatagcataaaatataatgaagagaaacgtcatgtggatcagcctattgattatagtttaaaatatgccacagatattccttcatcacagaaacagtcattttcattctcaaagagttcatctggacaaagcagtaaaaccgaacatatgtcttcaagcagtgagaatacgtccacaccttcatctaatgccaagaggcagaatcagctccatccaagttctgcacagagtagaagtggtcagcctcaaaaggctgccacttgcaaagtttcttctattaaccaagaaacaatacagacttattgtgtagaagatactccaatatgtttttcaagatgtagttcattatcatctttgtcatcagctgaagatgaaataggatgtaatcagacgacacaggaagcagattctgctaataccctgcaaatagcagaaataaaagaaaagattggaactaggtcagctgaagatcctgtgagcgaagttccagcagtgtcacagcaccctagaaccaaatccagcagactgcagggttctagtttatcttcagaatcagccaggcacaaagctgttgaattttcttcaggagcgaaatctccctccaaaagtggtgctcagacacccaaaagtccacctgaacactatgttcaggagaccccactcatgtttagcagatgtacttctgtcagttcacttgatagttttgagagtcgttcgattgccagctccgttcagagtgaaccatgcagtggaatggtaagtggcattataagccccagtgatcttccagatagccctggacaaaccatgccaccaagcagaagtaaaacacctccaccacctcctcaaacagctcaaaccaagcgagaagtacctaaaaataaagcacctactgctgaaaagagagagagtggacctaagcaagctgcagtaaatgctgcagttcagagggtccaggttcttccagatgctgatactttattacattttgccacggaaagtactccagatggattttcttgttcatccagcctgagtgctctgagcctcgatgagccatttatacagaaagatgtggaattaagaataatgcctccagttcaggaaaatgacaatgggaatgaaacagaatcagagcagcctaaagaatcaaatgaaaaccaagagaaagaggcagaaaaaactattgattctgaaaaggacctattagatgattcagatgatgatgatattgaaatactagaagaatgtattatttctgccatgccaacaaagtcatcacgtaaagcaaaaaagccagcccagactgcttcaaaattacctccacctgtggcaaggaaaccaagtcagctgcctgtgtacaaacttctaccatcacaaaacaggttgcaaccccaaaagcatgttagttttacaccgggggatgatatgccacgggtgtattgtgttgaagggacacctataaacttttccacagctacatctctaagtgatctaacaatcgaatcccctccaaatgagttagctgctggagaaggagttagaggaggggcacagtcaggtgaatttgaaaaacgagataccattcctacagaaggcagaagtacagatgaggctcaaggaggaaaaacctcatctgtaaccatacctgaattggatgacaataaagcagaggaaggtgatattcttgcagaatgcattaattctgctatgcccaaagggaaaagtcacaagcctttccgtgtgaaaaagataatggaccaggtccagcaagcatctgcgtcttcttctgcacccaacaaaaatcagttagatggtaagaaaaagaaaccaacttcaccagtaaaacctataccacaaaatactgaatataggacacgtgtaagaaaaaatgcagactcaaaaaataatttaaatgctgagagagttttctcagacaacaaagattcaaagaaacagaatttgaaaaataattccaaggtcttcaatgataagctcccaaataatgaagatagagtcagaggaagttttgcttttgattcacctcatcattacacgcctattgaaggaactccttactgtttttcacgaaatgattctttgagttctctagattttgatgatgatgatgttgacctttccagggaaaaggctgaattaagaaaggcaaaagaaaataaggaatcagaggctaaagttaccagccacacagaactaacctccaaccaacaatcagctaataagacacaagctattgcaaagcagccaataaatcgaggtcagcctaaacccatacttcagaaacaatccacttttccccagtcatccaaagacataccagacagaggggcagcaactgatgaaaagttacagaattttgctattgaaaatactccggtttgcttttctcataattcctctctgagttctctcagtgacattgaccaagaaaacaacaataaagaaaatgaacctatcaaagagactgagccccctgactcacagggagaaccaagtaaacctcaagcatcaggctatgctcctaaatcatttcatgttgaagataccccagtttgtttctcaagaaacagttctctcagttctcttagtattgactctgaagatgacctgttgcaggaatgtataagctccgcaatgccaaaaaagaaaaagccttcaagactcaagggtgataatgaaaaacatagtcccagaaatatgggtggcatattaggtgaagatctgacacttgatttgaaagatatacagagaccagattcagaacatggtctatcccctgattcagaaaattttgattggaaagctattcaggaaggtgcaaattccatagtaagtagtttacatcaagctgctgctgctgcatgtttatctagacaagcttcgtctgattcagattccatcctttccctgaaatcaggaatctctctgggatcaccatttcatcttacacctgatcaagaagaaaaaccctttacaagtaataaaggcccacgaattctaaaaccaggggagaaaagtacattggaaactaaaaagatagaatctgaaagtaaaggaatcaaaggaggaaaaaaagtttataaaagtttgattactggaaaagttcgatctaattcagaaatttcaggccaaatgaaacagccccttcaagcaaacatgccttcaatctctcgaggcaggacaatgattcatattccaggagttcgaaatagctcctcaagtacaagtcctgtttctaaaaaaggcccaccccttaagactccagcctccaaaagccctagtgaaggtcaaacagccaccacttctcctagaggagccaagccatctgtgaaatcagaattaagccctgttgccaggcagacatcccaaataggtgggtcaagtaaagcaccttctagatcaggatctagagattcgaccccttcaagacctgcccagcaaccattaagtagacctatacagtctcctggccgaaactcaatttcccctggtagaaatggaataagtcctcctaacaaattatctcaacttccaaggacatcatcccctagtactgcttcaactaagtcctcaggttctggaaaaatgtcatatacatctccaggtagacagatgagccaacagaaccttaccaaacaaacaggtttatccaagaatgccagtagtattccaagaagtgagtctgcctccaaaggactaaatcagatgaataatggtaatggagccaataaaaaggtagaactttctagaatgtcttcaactaaatcaagtggaagtgaatctgatagatcagaaagacctgtattagtacgccagtcaactttcatcaaagaagctccaagcccaaccttaagaagaaaattggaggaatctgcttcatttgaatctctttctccatcatctagaccagcttctcccactaggtcccaggcacaaactccagttttaagtccttcccttcctgatatgtctctatccacacattcgtctgttcaggctggtggatggcgaaaactcccacctaatctcagtcccactatagagtataatgatggaagaccagcaaagcgccatgatattgcacggtctcattctgaaagtccttctagacttccaatcaataggtcaggaacctggaaacgtgagcacagcaaacattcatcatcccttcctcgagtaagcacttggagaagaactggaagttcatcttcaattctttctgcttcatcagaatccagtgaaaaagcaaaaagtgaggatgaaaaacatgtgaactctatttcaggaaccaaacaaagtaaagaaaaccaagtatccgcaaaaggaacatggagaaaaataaaagaaaatgaattttctcccacaaatagtacttctcagaccgtttcctcaggtgctacaaatggtgctgaatcaaagactctaatttatcaaatggcacctgctgtttctaaaacagaggatgtttgggtgagaattgaggactgtcccattaacaatcctagatctggaagatctcccacaggtaatactcccccggtgattgacagtgtttcagaaaaggcaaatccaaacattaaagattcaaaagataatcaggcaaaacaaaatgtgggtaatggcagtgttcccatgcgtaccgtgggtttggaaaatcgcctgaactcctttattcaggtggatgcccctgaccaaaaaggaactgagataaaaccaggacaaaataatcctgtccctgtatcagagactaatgaaagttctatagtggaacgtaccccattcagttctagcagctcaagcaaacacagttcacctagtgggactgttgctgccagagtgactccttttaattacaacccaagccctaggaaaagcagcgcagatagcacttcagctcggccatctcagatcccaactccagtgaataacaacacaaagaagcgagattccaaaactgacagcacagaatccagtggaacccaaagtcctaagcgccattctgggtcttaccttgtgacatctgtttaaaagagaggaagaatgaaactaagaaaattctatgttaattacaactgctatatagacattttgtttcaaatgaaactttaaaagactgaaaaattttgtaaataggtttgattcttgttagagggtttttgttctggaagccatatttgatagtatactttgtcttcactggtcttattttgggaggcactcttgatggttaggaaaaaaatagtaaagccaagtatgtttgtacagtatgttttacatgtatttaaagtagcatcccatcccaacttcctttaattattgcttgtcttaaaataatgaacactacagatagaaaatatgatatattgctgttatcaatcatttctagattataaactgactaaacttacatcagggaaaaattggtatttatgcaaaaaaaaatgtttttgtccttgtgagtccatctaacatcataattaatcatgtggctgtgaaattcacagtaatatggttcccgatgaacaagtttacccagcctgctttgctttactgcatgaatgaaactgatggttcaatttcagaagtaatgattaacagttatgtggtcacatgatgtgcatagagatagctacagtgtaataatttacactattttgtgctccaaacaaaacaaaaatctgtgtaactgtaaaacattgaatgaaactattttacctgaactagattttatctgaaagtaggtagaatttttgctatgctgtaatttgttgtatattctggtatttgaggtgagatggctgctcttttattaatgagacatgaattgtgtctcaacagaaactaaatgaacatttcagaataaattattgctgtatgtaaactgttactgaaattggtatttgtttgaagggtcttgtttcacatttgtattaataattgtttaaaatgcctcttttaaaagcttatataaatttttttcttcagcttctatgcattaagagtaaaattcctcttactgtaataaaaacaattgaagaagactgttgccacttaaccattccatgcgttggcacttatctattcctgaaatttcttttatgtgattagctcatcttgatttttaatatttttccacttaaacttttttttcttactccactggagctcagtaaaagtaaattcatgtaatagcaatgcaagcagcctagcacagactaagcattgagcataataggcccacataatttcctctttcttaatattatagaattctgtacttgaaattgattcttagacattgcagtctcttcgaggctttacagtgtaaactgtcttgccccttcatcttcttgttgcaactgggtctgacatgaacactttttatcaccctgtatgttagggcaagatctcagcagtgaagtataatcagcactttgccatgctcagaaaattcaaatcacatggaactttagaggtagatttaatacgattaagatattcagaagtatattttagaatccctgcctgttaaggaaactttatttgtggtaggtacagttctggggtacatgttaagtgtccccttatacagtggagggaagtcttccttcctgaaggaaaataaactgacacttattaactaagataatttacttaatatatcttccctgatttgttttaaaagatcagagggtgactgatgatacatgcatacatatttgttgaataaatgaaaatttatttttagtgataagattcatacactctgtatttggggagggaaaacctttttaagcatggtggggcactcagataggagtgaatacacctacctggtgccttgaaaatcacatcaagtagttaattatctaccccttacctgtgtttataacttccaggtaatgagaatgattttttttaaagctaaaatgccagtaaataaaagtgctatgacttgagctaagatatttgactccaatgcctgtactgtgtctactgcaccactttgtaaacacttcaatttactatctttgaaatgattgacctttaaatttttgccaaatgttatctgaaattgtctatgaataccatctacttctgttgttttcccaggcttccataaacaatggagatacatgcaaaaaaaaaaaaaaaaaa

SEQ ID NO: 106 - DNA, 3705 bp, Homo sapiens
acggcgcgcggcgagctgagggtggcggcggtcgacatgttccaggtcccggatagcgagggcggccgcgccggctccagggccatgaagcccccaggaggagaatcgagcaatctttttggaagtccagaagaagctactccttccagcaggcctaataggatggcatctaatatttttggaccaacagaagaacctcagaacatacccaagaggacaaatcccccagggggtaaaggaagtggtatctttgacgaatcaacccccgtgcagactcgacagcacctgaacccacctggagggaagaccagcgacatttttgggtctccggtcactgccacttcacgcttggcacacccaaacaaacccaaggatcatgttttcttatgtgaaggagaagaaccaaaatcggatcttaaagctgcaaggagcatcccggctggagcagagccaggtgagaaaggcagcgccagaaaagcaggccccgccaaggagcaggagcccatgcccacagtcgacagccatgagccccggctggggccgcggcctcgctctcacaacaaggtcctgaacccaccgggaggcaaatccagcatctccttctactaagagaagccactgctccacccggagccagaccagaaactcaagagatagggtagccatgttttcatttccttttgcccaaatgagcggggtgggaagagggttagtcttatgtgagcctggctgctcagcgtctcctggccgtcatgacagctgcttggagacccgtgccttccagatggctgggagatgcctctgtggggatgaaatggggcacccctggccatcactcatgtgtagtccaggtttgagaggaactggaaggggggtgagggtggggaggtggggcagggcatggtccttggatcaacagcccgccagctgattggatgtctaggaatgactgaaagaaaccaaaacagcctgtccactgctgctgtgggatggaggaggcgtaagcagaaacactaacagtatattgacctcttagcagaaccgcttccattctggagatcacggctgctaaatccagcatccccacttcattttacccccagcatattgttctgtagtcttttcttgaaacatcttgattgcttttcctcggcagctttcaaaaaaccaaataataatagttatccgtcttctacttcatggaagattgttttggtgccctgaccctctgaagtgcccagttcctgccatctgaaacctcggcctgatctgatctcatgttggaatctgcctgtctttcacacagggctggtcttggtcctttacatgccagttttgcttgtgaattcttgcttttttcctctcatcagccttaagtttaggcgtttgttgttctccagtgatgtagacagttcccttcacaagtcacagttcttcccataaatgaggcccgctgacctctgcgggactttaaaaatctattcagatatttccgagtaagtggcttgtttaaattcttcctgtgtctttctttattccttaattggttggtggaaagaagagatgcttgggaaccttgggttcttaggtttggattctttaataatatctaaaaagctaaattttaaataccagctttacataaatgattgttgactctggtctgtttctgacacctttccagaaaaaagtcaattgttcaggtacaccaaagaggaagaagagctgtggaggccaccctctacaaagctttatagaacttctggatctaactcacaaacaagcttccagaagagactagagaccttaggccaggagatgaaggagttcagtagcaaagtcacacctgtccaattccctgagctttgctcactcagctaatgggatggcaaaggtggtggtgctttcatcttcaggcagaagcctctgcccatccccctcaagggctgcaggcccagttctcatgctgcccttgggtgggcatctgttaacagaggagaacgtctgggtggcggcagcagctttgctctgagtgcctacaaagctaatgcttggtgctagaaacatcatcattattaaacttcagaaaagcagcagccatgttcagtcaggctcatgctgcctcactgcttaagtgcctgcaggagccgcctgccaagctccccttcctacacctggcacactggggtctgcacaaggctttgtcaaccaaagacagcttcccccttttgattgcctgtagactttggagccaagaaacactctgtgtgactctacacacacttcaggtggtttgtgcttcaaagtcattgatgcaacttgaaaggaaacagtttaatggtggaaatgaactaccatttataacttctgtttttttattgagaaaatgattcacgaattccaaatcagattgccaggaagaaataggacgtgacggtactgggccctgtgattctcccagcccttgcagtccgctaggtgagaggaaaagctctttacttccgcccctggcagggacttctgggttatgggagaaaccagagatgggaatgaggaaaatatgaactacagcagaagcccctgggcagctgtgatggagcccctgacattactcttcttgcatctgtcctgccttctttccctctgcgaggcagtggggtgggattcagagtgcttagtctgctcactgggagaagaagagttcctgcgcatgcaagccctgctgtgtggctgtcgtttacatttgggaggtgtcctgtatgtctgtacgttggggactgcctgtatttggaagatttaaaaacctagcatcctgttctcaccctctaagctgcattgagaaatgactcgtctctgtatttgtattaagccttaacacttttcttaagtgcattcggtgccaacattttttagagctgtaccaaaacaaaaagcctgtactcacatcacaatgtcattttgataggagcgttttgttatttttacaaggcagaatggggtgtaacagttgaattaaacttagcaatcacgtgctcagagcttttgcctgtcagttgtgtgtgtcccttatagtcccttcccccacagctcttgctgaaagagtttgccttgttttgttttgttgttttgtatttagccagaggatgccaaaattagtcttctcaaagctttgagtagagtaagtgtgggaataagccagtttttttttttctgtttctgtaacttaaatgaacgggtttttttcccttgtatgccacttgtcctaacatgtccttaaggtgtttaacctgcctctgacctggcttgcaatgcataggtgaggagaagcagagagcttgtcatatgcaagtcctgtcaagaaaacaggtgggcatggtggctcaggtctgtagtctttgggtctttgggaggccagggtgggaggatcacttgagctcaggagtttgagaccagcctagacaacatactacgaccctgtctatacaaaaaaaaacttctctaaattagccggatgtggtggtgcatgcctgtagtcccagctactcgggaggctgagtgaggcaggaggatcacttgagaccaggaggttgtggctgtagtgagtgatgatcatgccactgcacttcagcctggaccacagagcaagaccctgtgtaaaaaaataaaataaaaaacagattggaaaaaaaaaaaaaaaaaaaaaaa

SEQ ID NO: 107 - DNA, 321 bp, Homo sapiens
atgatggcgactggaacgccagagtctcaagcgcggttcggtcagtccgtgaaggggcttctcacggagaaggtgaccacctgtggtactgacgtaatcgcgctcaccaagcaggtgctgaaaggctcccggagctccgagctgctaggtcaggcagctcgaaacatggtactccaggaagatgccatcttgcactcagaagatagtttaaggaagatggcaataataacaacacatcttcaataccagcaagaagctattcagaagaatgttgaacagtcatcggatctacaggaccagttgaatcatctgttgaaatag

SEQ ID NO: 108 - DNA, 3540 bp, Homo sapiens
cagaggaggagctcgctgccgggggacgctgggctgagcggccggcggcgcgggcccggcggcggcggcagcggggtccgggtccggagcgccacatgagacggtttaagcggaagcatcttactgccattgactgccagcatttggctcggagtcacttggctgtgacccagcccttcggtcaaagatggacaaacagagatccgaaccatggtctctatcctaaaccgagaacaaaaagagggagtaggggtcagggaagtcaaagatgcatccctgagttcttcctagcaggcaagcagccgtgcaccaatgacatggccaaaagcaattctgttggccaggacagctgtcaggactctgagggtgacatgatctttcctgcagagagcagctgtgcactgcctcaggaaggcagtgcagggccgggctcaccagggtctgccccgccctccaggaagcggtcttggtcctctgaggaagagagtaaccaggctaccgggaccagccggtgggatggagtttctaagaaagctccacggcaccatttgtctgtgccatgcacaaggcctagggaggccaggcaagaagcagaggacagtacgtctcggctctctgcggagtctggtgaaaccgaccaagatgctggggacgtgggtcctgatcccattcctgactcatactatgggcttcttgggaccttgccctgccaggaagcactgagccacatttgcagcctgcctagtgaggtcctgaggcacgtgtttgccttcctcccggtggaagacctctattggaacctgagcttggtgtgccacttgtggagggagatcatcagtgacccgctgttcattccttggaagaagctgtaccatcgatacctgatgaatgaagagcaagctgtcagcaaagtggacggcatcctgtctaactgtggcatagaaaaggagtcagacctgtgtgtgctgaacctcatacgatacacagccaccactaagtgctctccgagtgtggatcccgagagggtgctgtggagtctgagggaccaccccctcctccccgaggctgaggcgtgtgtgcggcaacacctccccgacctctacgctgctgccgggggtgtcaacatctgggccctggtggcggctgtggtgctcctctccagcagtgtgaatgacatccagcgactgctcttctgcctccggagacccagctccacggtgaccatgccagatgtcaccgagaccctgtactgcatagccgtgcttctctacgccatgagggagaaggggattaacatcagcaataggattcactacaacattttctattgcctatatcttcaggagaattcctgcactcaggccacaaaagttaaagaggagccatctgtctggccaggcaagaaaaccatccaacttacacatgaacaacagctgattctgaatcacaagatggaacctctccaggtggtgaaaattatggcctttgccggcactgggaagacctcaacgctggtcaagtatgcagagaagtggtctcagagcaggtttctgtatgtgacattcaacaagagcatcgcaaagcaggccgaacgcgtcttccccagcaacgtcatctgcaaaaccttccactccatggcctacgggcacatagggcggaagtaccagtcaaagaagaagttgaatctcttcaagttaacacccttcatggtcaactccgtccttgctgaagggaagggtggattcataagagccaagcttgtgtgtaagactctagaaaacttctttgcctcggctgacgaagagctgaccattgatcacgtgcctatttggtgtaagaacagccaaggacagagagtcatggttgagcagagtgaaaaactgaatggtgtccttgaagcgagccgcctctgggataacatgcggaagctgggggagtgcacagaagaggcgcaccagatgactcatgacggctacttgaaactctggcagctgagcaagccttcgctggcctcttttgacgccatctttgtggatgaggcccaggactgcacaccagctatcatgaacatagttctgtctcagccatgtgggaaaatctttgtaggggacccgcaccagcagatctataccttccggggtgcggtcaacgccctgttcacagtgccccacacccacgtcttctatctcacgcagagttttcggtttggtgtggaaatagcttatgtgggagctactatcttggatgtttgcaagagagtcaggaaaaagactttggttggaggaaaccatcagagtggcattagaggtgacgcaaaggggcaagtggccttgttgtcccggaccaacgccaacgtgtttgatgaggccgtacgggtgacggaaggggaattcccttcaaggatacatttgattggggggattaaatcatttggattggacagaatcattgatatttggatccttcttcagccagaggaagaacggaggaaacaaaacctcgtcattaaagacaaatttatcagaagatgggtgcacaaagaaggctttagtggcttcaagaggtatgtgaccgctgccgaggacaaggagcttgaagccaagatcgcagttgttgaaaagtataacatcaggattccagagctggtgcaaaggatagaaaaatgccatatagaagatttggactttgcagagtacattctgggcactgtgcacaaagccaaaggcctggagtttgacactgtgcatgttttggatgattttgtgaaagtgccttgtgcccggcataacctgccccagcttccgcacttcagagttgagtcattttctgaggatgaatggaatttactgtatgttgcagtaactcgagccaagaagcgtctcatcatgaccaaatcattggaaaacattttgactttggctggggagtacttcttgcaagcagagctgacaagcaacgtcttaaaaacaggcgtggtgcgctgctgcgtgggacagtgcaacaatgccatccctgttgacaccgtccttaccatgaagaagctgcccatcacctatagcaacaggaaggaaaacaaggggggctacctctgccactcctgtgcggagcagcgcatcgggcccctggcgttcctgacagcctccccggagcaggtgcgcgccatggagcgcactgtggagaacatcgtactgccccggcatgaggccctgctcttcctcgtcttctgaggacaaggcgcacgttctccgcagtgcagagcagcttgccgaggaccccgcgtgaagaaagccagcgaggggggcttctgctccctgagactctgggttcacccacagcactttctgaggaagaggacaccagcccaagctggacctgccatttctccactccctacagacagccagtctccacttgcctcccctctggatgtatctggtcagggaagtgggggatgttcttttgataaaaaaaaaaaaaaaaatttatgtatttaaacttttattacaagatttcaattaaacaggcaccatagcactggca

SEQ ID NO: 109 - DNA, 3570 bp, Homo sapiens
aggaaattagtgcgcatgtgccggtcatccggaagttaccgcagtggccgccggaattaggcgaaaagccggaagtaaacattacgagattggcttggattctgtcggatggacttggggctagctgcggcggggctggaggaggccagataaccatgtcagccacagttgtagatgcagttaatgctgcacccctatcggggtccaaagaaatgagtttggaagaaccaaagaagatgaccagagaggactggagaaagaagaaggagctagaagaacagcgaaaattgggcaatgctcctgcagaagttgatgaagaaggaaaagacatcaacccccatattcctcagtatatttcttcagtgccatggtatattgatccttcaaaaagacctactttaaaacaccagagaccacaaccagaaaaacaaaagcagttcagctcatctggagaatggtacaagaggggtgtaaaagagaattccataattactaagtaccgcaaaggagcatgtgaaaattgtggggccatgacacacaaaaagaaagactgctttgagagacctaggcgagttggagccaaatttacaggtactaatatagctccagatgaacatgtccagcctcaactgatgtttgactatgatgggaagagggatcggtggaatggctacaatccagaagaacacatgaaaattgttgaagagtatgccaaagttgatttggcaaaacgaacattgaaagcccagaaactccaagaggaattagcctcaggaaaattagtggaacaggctaattctccaaaacaccagtggggagaagaggaaccaaattctcagatggaaaaagatcataatagtgaagatgaggatgaagataaatatgcagatgatattgacatgcctggacagaattttgactccaagagacgaattactgtccggaatctcaggattcgagaagatattgcaaaatatttgaggaatttagatccaaattctgcctactatgatccaaaaactagagcaatgagagagaatccttatgccaatgcaggaaagaatccagatgaagtgagttatgctggagataactttgttaggtacacaggagataccatttcaatggctcagacacagttgtttgcatgggaagcctatgacaagggatctgaagtgcatctacaggcagatcctacaaagctagagctgttgtataagtccttcaaagtcaaaaaagaagatttcaaagaacagcagaaagaaagcatcctggaaaagtatggtggccaagaacatttggatgcccctccagctgaattgcttttagcccagactgaagactatgtggagtactcaagacatgggacagtcatcaaaggacaggagcgggctgttgcctgctctaagtatgaggaggatgtgaagatccacaatcacacacatatctggggatcgtactggaaagaaggccgatggggatacaaatgctgtcactcttttttcaagtattcctattgtactggagaagctgggaaggagattgttaactctgaggagtgtattataaatgagataactggggaagaatctgtgaaaaaacctcaaaccctcatggagctgcatcaagaaaaactgaaagaggaaaagaagaagaagaaaaagaaaaagaagaagcatcgaaagagcagttcagatagtgatgatgaagaaaagaagcatgaaaaattgaaaaaggcactgaacgcagaggaggcccgccttcttcatgtcaaggagaccatgcagattgatgagaggaagcggccttacaatagcatgtatgaaactcgagaacctactgaagaggaaatggaggcatatagaatgaaacgtcagaggccagatgaccccatggcctctttccttggacagtagcaactagtcagaagaccatccaagatagatgcagctgatacattcttttcagcttcttattgatgattgtagatagaaaaatccttgtttattcttcttgctgcctggctttaataaatatttcagatgcctcacagtaagttcactcctttccatactgaggaaacaagaaaagaagaagaggcacatgaagtgtgcttttgggaatagaatttaaaattggattaagattttatttccagttttttttatttatttatttttttttttgagacggagtcttgctctgtcgcccaggctgaagtgcggtggcgcgatctcggctcactgcaagctccacctcccaggttcacgccattctcctgcctcagcctccctagtagttgggactacaggcgcccgccaccatgctcagctaattttttgtatttttagtagagacggtttcatcgtgttagccaggatggtctcgatctcctgaccttgtgatccacccgcctcagcctcccaaagtgctgagattacaggcgtgagccaccgcgcctggcctatttccagttttatgtgagtcatgtaaaaaagccttggctctctacctattaagaatgtctctttctctgtatttattaagcttcaaactttattgcttcgatttttgtggccctatatttagtattagcacaccttggttttgagaaaaaaacagggctttgtttttttaaataattactagcaactctgtgactacatttatttttattttttttagagacaggatcttgctatgttgcccaggctagagagcagtggcttttcacagacaaagtcataatgccctgcagtcttgggctcaagcgattctctcttccttggcctctggagtagactaaatgtgttagtctttgaatggaaaacaactattttctcatcattgggtcaatattgactgatcagtagtaggtcttttaccattctggacataagtctaggtgtagaaatcctttcctttatcatagaggatatggtttacattaccgtttgttttcattgtgattgcccctatgtaacaatcatgaatattagattttttaaattgtagaatatcctaatatttatagccagcagctgttactttgtttgtaaaatttgcaaaaaaacaaaacctgaagttggtttattgaaagaattataaggatagcttctagggatattagtaatagattgccatgatcctgaagcctcttctcagaacactgtgaagataatactgacagtagaatcagtgaaaacagcctaacaaaacctctgacatcagtatatcaacttttaacagcccactcactggcttttctaaactaccaaaaaccacctgtaggatactgcattaagtcagcatctcagaaacagtggtgtgagtaactgagtcaaattgtcaagtactttggatatacatagtgtcgagctttagattggtatgaaattaaacagcaatgcaaatagatttaattcctatttactttaagaatgaaaaacaatgttcattttcctacctaaacagggtggttcaacataaaggctgatgttgtgtccgttttgtattttatcttttgttaaagatacataaatgacaatacttaactgtgaaaaaaaaaaa

SEQ ID NO: 110 - DNA, 4581 bp, Homo sapiens
ggtccgtgaggcgcgggcggcggcgaccgcggcgccagtgagggggccctggggcccgggcggctccgggccggggccccgccgcgggacggaccatgctacgctccactggcttcttccgggccattgactgcccctattggtctggggcgcccggggggccctgccggcggccctactgccacttccggcaccgcggggcccggggctccggcgcgcccggtgacggcggagaggcgccccccgcagcagggctgggttacgacccctacaaccctgagctgcccaagccccccgcgcagagggagaatggcaccctgggcctgggggaggagccgcgcccggatgtgctggagttggagctggtcaaccaggccatcgaggccgtgcgcagtgaggtggagctggagcagcggcgctaccgggagctgctggagacgacccgtgagcaccgctccgccgaggcccccgccctggcgccccgcggccccaacgccagccccactgtgggcccggacgaggatgccttcccactggccttcgactacagccccggcagccacggcctattaagccctgatgccggctaccagcccaccccactggccgcccctgccgagccgggcagcaagtactcgctggcgtccctggacaggggtcagggcagaggtggagggggtggcggtgccctggaatacgtccccaaggctgtgagccagccccggcggcacagccgccccgttcccagtggcaagtacgtggtggacaactccaggccacccacagacctggagtatgaccctctctccaactactcggcccggcacctcagcagggccagctcccgggatgagcgggccgccaagcggccccggggctcccgcggcagtgagccctacacacctgctcccaagaagctctgtgacccctttggcagttgcgatgcaaggttctcagactcagaagatgaggccgccacggtcccaggtaacgagcccaccacggccagcacccccaaagccagggccgaccctgagatcaaggccaccgggcagccaccctccaaagagggcctggaggccgaggggggcggcctgcgggagaccaaggagacggccgtgcagtgcgacgtgggggacctccagccgcccccagccaagcccgcctccccagcccaggtccagtcctcacaggatgggggctgccccaaggagggaaaacccaagaagaaaaaaaccggggccccacctgcccccagctgcaaagacggggcccaggggaaggacaagaccaaggacaagggccgagggcggcctgtggagaagccccgtgcggacaagaagggcccgcaggccagcagcccccggcgcaaggcagagcggccggaagggaccaagaagaagccatcttcggccactcctgtggccacctcagggaaagggaggcctgaccggccagcgcggcggccgagccccacaagcggggactcccgaccggcggccggcagaggcccaccccgccccctccagctgcccgacaggaagagcaccaaggccccgtcggggaagctagtggagcggaaagcccgctcactagacgagggcgcctcccaggacgcccccaagctgaagaagcgggccctgagccacgccgacctctttggggacgagagtgaggacgaggccgcagggccaggggtgccgagcgtgtggccctctgccctccccagcctcagctcggactcagactccgactcagactccagcctgggcttcccggaggcgcaggggccgcccaagcggctcaaggcctccccgcccccctcccccgccccatcctcctcctcctcctcctcctcctccacctccagcgcgggggcggatgtggactactcggccctggagaaggaggtggactttgactccgaccccatggaggagtgcctgcggatcttcaacgagtccaccagcgtcaagacggaggacagaggccggctggcccggcagccccccaaggaagagaagagtgaggagaaggggctttcgggtctgaccactctgttccccgggcagaagaggaggatctcccacctttccaagcaaggccaggaggtggagcccccgaggaggggtcccgcggtgcccccggcccggcccccgacggcgcaggaggtgtgctacctgcgggcccagcaggcgcagagggcatcggcgagcttgctgcaggcccccgccaggctggcagagaagtcgccctccgtccacatttccgcccctggcgagaagaggaggatcgcccacatccccaacccccgcctggctgcagcccccacaggtgccaagaggacccttgcggccagcggcagccagtcctccaacggccctgagccaggtggccagcagctgaaaacacgcacattgtcggggatggcgtccaagactaccaccaccatcatccctaagcgaatcgcccacagtccatccttacagagtttaaagaaacccattatccccaaagagtttgggggcaaagtccccaccgtcatccgccagcgctatctcaacctgttcatcgaggagtgtctcaagttctgtacctccaaccaggaggccatagagaaggcactgaacgaggagaaggtggcctatgaccgcagccccagcaagaacatctacctgaatgtggccgtgaacaccctcaagaagctcaggggcctggcccccagcgctgtgcccggcctcagcaaaaccagtggccgcagggttgtgtcccacgaggtggtgttggggggcaggttggccgccaagaccagcttctcgctcagccgtccaagcagcccccgggtggaggacctgaaaggggctgccctgtacagccgcctcagggagtacctgctcacccaggaccagctcaaggagaacggctaccccttcccgcacccagagcggcccgggggcgcaatcatcttcacagctgaggagaagaggcccaaggactcttcctgcaggacctgctgccgctgtggcaccgagtacctcgtgtcctcttcaggccgctgcatccgggacgaggagtgttattaccactggggacggctgcgccggaaccgggtggccggaggctgggagacccagtacatgtgctgctcggctgccgccggctctgtcggctgccaagtcgcaaagcaacacgtgcaggatggccggaaggagcgccttgagggcttcgtgaagacctttgagaaagagctctcaggagacacccacccggggatctacgccctggactgcgagatgtcctacaccacatatggcctggagctgacgcgcgtcacggtggtcgacacggacgtgcacgtggtttatgacaccttcgtgaagcctgacaacgagatcgtggactacaacaccaggttttcgggggtgacggaggctgaccttgccgacacaagtgtcacgctgcgtgacgtccaggccgttctgctgagcatgttcagcgctgacaccatcctcatcggacacagcctggagagcgacctcctggccctgaaggtcatccacagcaccgtggtggacacgtctgtgctcttcccccaccgcctgggcctcccctacaagcggtccctgcggaacctcatggccgactacctcagacagatcatccaggacaatgtggatgggcacagctccagcgaggacgccggcgcctgcatgcacctggtgatctggaaggttcgagaagacgccaagaccaagcgatgacgcctgcccgcctcccacccgcctctcctgccgtcccgctggtccttagccccatgcctcttccaaaacagtgcaataaatctccggtaacccgtccacctggccgaggcagcccagagcagcgggatgagctggcggccagagaacgcccagcccagcccacccccgctcacgtcctgccgcacccctccgccggtccccaccctctgccccccagccctctggcgtctctagaaactgctgctgatggagaccaggacagagcccgcccccacccggcccgcagcccctcctgcccctcctgccaggccctccctcccgggtggtggccggcacctctgctcctcacgtgggtcgcggggcgggcttgtcccaggtttgtttgagacagtctttttttattttgtattgttatttttattatttttaatttaaacctgatgacttgcacagcatctttcccaccgggaagagcgggcctgctgccttccctcctgcggggtgggggtgggacagaccccagtgggggccagggccacactcagcgcagtgtgggctggacccgcctctgtgctccaggggctggccggtcttcgggggcgccggcttccaccactcgccgccccacccctgcactccgtgacctctgagaacccagctggcccctcgttagccccagggtctgccgtctagagggagcccaccggcctccggacactgtcttcccgctagagccccgtcctcctctgcggggctctccggacccccttccccctcacctccaggcagggacagaataaatgtttgtatggattttaga

SEQ ID NO: 111 - DNA, 435 bp, Homo sapiens
atgtactcggagatccagagggagcgggcagacattgggggcctgatggcccggccagaatacagagagtggaatccggagctcatcaagcccaagaagctgctgaaccccgtgaaggcctctcggagtcaccaggagctccaccgggagctgctcatgaaccacagaaggggccttggtgtggacagcaagccagagctgcagcgtgtcctagagcaccgccggcggaaccagctcatcaagaagaagaaggaggagctggaagccaagcggctgcagtgcccctttgagcaggagctgctgagacggcagcagaggctgaaccagctggaaaaaccaccagagaaggaagaggatcacgcccccgagtttattaaagtcagggaaaacctgcggagaattgccacactgaccagcgaagagagagagctgtag

SEQ ID NO: 112 - DNA, 1290 bp, Homo sapiens
atgtcccgggacccggggtcgggcggctgggaggaggccccgcgcgcagctgccgcgctctgcaccctgtaccacgaggccggacagcggctgcgccgcctgcaggaccagctcgctgcccgcgacgccctcatcgctcgcctccgcgcccgcctggccgcgctggagggggacgccgcgccgtccctagtggacgcgctgctggagcaggttgcgcgcttccgggagcagctgcgaaggcaggagggcggcgccgccgaggcccagatgcgccaggaaattgagaggctgactgagcgactagaagaaaaagagagggagatgcagcagctgctgagccagccccaacacgagcgagagaaggaagtcgtcctgctacggaggagcatggcagaaggggagcgcgcccgggccgccagtgacgtcctgtgccgctccttggccaacgagacccatcagctgcggaggacgctgaccgccaccgcccacatgtgtcagcatctggccaagtgtctggatgaacgacagcatgcacaaaggaatgtgggggagagaagtcctgaccagtcggaacacacagatgggcacacctctgtccagagtgttattgagaagttgcaggaagaaaatcgactgttaaaacagaaggtgactcacgttgaagacctcaatgccaagtggcagcgctacaacgccagcagggacgaatacgtgagggggctccatgcgcagctcagggggctgcagatcccccacgagcccgagctgatgaggaaggagatctcccggctcaacagacagttggaagagaaaataaatgactgtgccgaagtgaagcaggagctggcggcctccaggacggcccgggatgctgcgttggagcgggtgcagatgctggaacagcagattctcgcttacaaggatgacttcatgtcagaaagggccgatcgggaacgggctcaaagtaggattcaagaactggaggaaaaggtcgcctctttgctgcaccaggtgtcctggagacaggattctcgagagccagacgccggccggattcacgctgggagcaaaactgccaagtatttggccgccgacgcattagagcttatggtgcctggtggctggaggcctgggactgggtcccagcagccagaaccccctgcagagggcgggcatcctggcgcggcccagagaggccagggggaccttcagtgccctcactgcctgcagtgcttcagtgacgagcaaggggaagagctcctcaggcatgtggctgagtgctgccagtga

SEQ ID NO: 113 - DNA, 2109 bp, Homo sapiens
ggaagtggcttcgctagggagcctcccggcgtggagatggcgggagctggtcgcggagcagcggtgtccagggtgcaggcgggtcctgggagtccccggcgagcgcgggggcggcagcaagtgcagccgctggggaagcagcgcccagccccgtggcccgggcttcgcagcaaagagaagaagaaagtgaactgcaagcccaagaaccaggacgaacaggagattcctttccggctccgggagattatgaggagccgccaagagatgaaaaacccgatcagtaacaagaagaggaagaaagcagcccaggtgaccttcagaaagacattggagaaggaagcaaagggagaggagcccgacatcgcagtccccaagttcaaacagaggaagggggagtccgacggggcctatatccaccgcatgcagcaagaggcccagcatgtgctgttcctcagcaagaaccaggccatccggcagccagaggtgcaggcagctcccaaggagaagtctgagcagaaaaaagcaaaaaaagcgttccagaagcggcgactagataaagtccgacggaaaaaggaggaaaaggcggcagacaggctggagcaggagttgctccgagacacggtgaagtttggtgaggttgtcctgcagcccccagagctgactgccaggccccagaggagcgtaagcaaggaccagcctggcaggagatcgcagatgctgcggatgcttctgagccccggtggtgtgtcccagcctctgaccgcctccctggcccgccagcggattgtggaggaggagagagagcgggccgtgcaggcctacagagcgttgaagcagcggcagcagcagctgcacggggagcgaccccacctcacttcccggaagaagccagagccgcagctgtgatggagagacacccggggcctggccacgctctggggcaactggcaccaggagctgctacacctgggtaggagagaggcaggccatgccagcagtgtggggtgaggcctccagctacttgttcacacgttgggcactagtgggtccacatcttgcagggggtgagtgcccgatggactagggccaaggcctggttgacagacggcccgtggggcccggtgtcactcacagctccatctctttgttttgaacgtccattctgagtctcagcccaggtggaccttaggaagggctggatccctgtccctgaacaccaaataccgagacagctgatgaggctggctcagtgtgtgacggaggcccccgggagtcagcagagccgagcgtacagtgcacatcaggcagagcaggccacgggcagggacgacgcatcgggacagggctctgcaggggaccgtgactacaggccagctgtgagtggtcccctacagaggctgcccacccaaggtttggttggggtgaaacatgatgacaacacatacacttaagaaggtgggaaccgggggccgggcgcggtggctcacacctgtaatgccagcactttgggcagctgaggcgagtggatcacctgaggtcaggagttcgaaccagcctggccaacatggtgaaactgcatctctactaaaaatacacgaagaaaaaaaaaacagtgggaacagagttgtcacctacctaacagggctctgagagagccgggaggcccaaagtggctggaagaaggtaaaggaaaaatcctgtcttgggctcaaggtcacagagtggggcccagggggagttcctgctgagggcagggccttgccaggcttcagtctccagtgccaaaggaggaaatgcccaggctgtcagcatttccagatgagagcagaagggagaagcttaaacccaagtcacacatccagcaatggagtccgacagcccagcaccatctgggaactgagaagcacctctgcccggcccccacaccgtgtggaaagtgaggagcacctctgcctggccgccaccccgtctggcaagtgaggagcgcctctgcccggccgctgtgcaaccttccaagtgtgaagtgacagccttgtgtgtgatgttttctgccttccccaagtttgcactttcgacattaaagtttactttttagttaaaagttttaaa

SEQ ID NO: 114 - DNA, 1473 bp, Homo sapiens
atgaagcctaaactgatgtaccaggagctgaaggtgcctgcagaggagcccgccaatgagctgcccatgaatgagattgaggcgtggaaggctgcggaaaagaaagcccgctgggtcctgctggtcctcattctggcggttgtgggcttcggagccctgatgactcagctgtttctatgggaatacggcgacttgcatctctttgggcccaaccagcgcccagccccctgctatgacccttgcgaagcagtgctggtggaaagcattcctgagggcctggacttccccaatgcctccacggggaacccttccaccagccaggcctggctgggcctgctcgccggtgcgcacagcagcctggacatcgcctccttctactggaccctcaccaacaatgacacccacacgcaggagccctctgcccagcagggtgaggaggtcctccggcagctgcagaccctggcaccaaagggcgtgaacgtccgcatcgctgtgagcaagcccagcgggccccagccacaggcggacctgcaggctctgctgcagagcggtgcccaggtccgcatggtggacatgcagaagctgacccatggcgtcctgcataccaagttctgggtggtggaccagacccacttctacctgggcagtgccaacatggactggcgttcactgacccaggtcaaggagctgggcgtggtcatgtacaactgcagctgcctggctcgagacctgaccaagatctttgaggcctactggttcctgggccaggcaggcagctccatcccatcaacttggccccggttctatgacacccgctacaaccaagagacaccaatggagatctgcctcaatggaacccctgctctggcctacctggcgagtgcgcccccacccctgtgtccaagtggccgcactccagacctgaaggctctactcaacgtggtggacaatgcccggagtttcatctacgtcgctgtcatgaactacctgcccactctggagttctcccaccctcacaggttctggcctgccattgacgatgggctgcggcgggccacctacgagcgtggcgtcaaggtgcgcctgctcatcagctgctggggacactcggagccatccatgcgggccttcctgctctctctggctgccctgcgtgacaaccatacccactctgacatccaggtgaaactctttgtggtccccgcggatgaggcccaggctcgaatcccatatgcccgtgtcaaccacaacaagtacatggtgactgaacgcgccacctacatcggaacctccaactggtctggcaactacttcacggagacggcgggcacctcgctgctggtgacgcagaatgggaggggcggcctgcggagccagctggaggccattttcctgagggactgggactccccttacagccatgaccttgacacctcagctgacagcgtgggcaacgcctgccgcctgctctga

SEQ ID NO: 115 - DNA, 1119 bp, Homo sapiens
atgtctctacgctgcggggatgcagcccgcaccctggggccccgggtatttgggagatatttttgcagcccagtcagaccgttaagctccttgccagataaaaaaaaggaactcctacagaatggaccagaccttcaagattttgtatctggtgatcttgcagacaggagcacctgggatgaatataaaggaaacctaaaacgccagaaaggagaaaggttaagactacctccatggctaaagacagagattcccatggggaaaaattacaataaactgaaaaatactttgcggaatttaaatctccatacagtatgtgaggaagctcgatgtcccaatattggagagtgttggggaggtggagaatatgccaccgccacagccacgatcatgttgatgggtgacacatgtacaagaggttgcagattttgttctgttaagactgcaagaaatcctcctccactggatgccagtgagccctacaatactgcaaaggcaattgcagaatggggtctggattatgttgtcctgacatctgtggatcgagatgatatgcctgatgggggagctgaacacattgcaaagaccgtatcatatttaaaggaaaggaatccaaaaatccttgtggagtgtcttactcctgattttcgaggtgatctcaaagcaatagaaaaagttgctctgtcaggattagatgtgtatgcacataatgtagaaacagtcccggaattacagagtaaggttcgtgatcctcgggccaattttgatcagtccctacgtgtactgaaacatgccaagaaggttcagcctgatgttatttctaaaacatctataatgttgggtttaggcgagaatgatgagcaagtatatgcaacaatgaaagcacttcgtgaggcagatgtagactgcttgactttaggacaatatatgcagccaacaaggcgtcaccttaaggttgaagaatatattactcctgaaaaattcaaatactgggaaaaagtaggaaatgaacttggatttcattatactgcaagtggccctttggtgcgttcttcatataaagcaggtgaatttttcctgaaaaatctagtggctaaaagaaaaacaaaagacctctaa

SEQ ID NO: 116 - DNA, 801 bp, Homo sapiens
atgccgaaaggaaagaaggccaagggaaagaaggtggctccggccccagctgtcgtgaagaagcaggaggctaagaaagtggtgaatcccctgtttgagaaaaggcctaagaattttggcattggacaggacatccagcccaaaagagacctcacccgctttgtgaaatggccccgctatatcaggttgcagcggcagagagccatcctctataagcggctgaaagtgcctcctgcgattaaccagttcacccaggccctggaccgccaaacagctactcagctgcttaagctggcccacaagtacagaccagagacaaagcaagagaagaagcagagactgttggcccgggccgagaagaaggctgctggcaaaggggacgtcccaacgaagagaccacctgtccttcgagcaggagttaacaccgtcaccaccttggtggagaacaagaaagctcagctggtggtgattgcacacgacgtggatcccatcgagctggttgtcttcttgcctgccctgtgtcgtaaaatgggggtcccttactgcattatcaagggaaaggcaagactgggacgtctagtccacaggaagacctgcaccactgtcgccttcacacaggtgaactcggaagacaaaggcgctttggctaagctggtggaagctatcaggaccaattacaatgacagatacgatgagatccgccgtcactggggtggcaatgtcctgggtcctaagtctgtggctcgtatcgccaagctcgaaaaggcaaaggctaaagaacttgccactaaactgggttaa

SEQ ID NO: 117 - DNA, 1768 bp, Homo sapiens
agtcatttcttctgcggaacctccacccctccagtgggtgcgggaccctaggcagcaggccaggcaccgccgctctgactgggggccccgaagcagttaacgggccggacagcaaagtggaaagttagaccagctgggaccaggggaggtgggcacccggctgcgggaggagcggccaggctggcactgcccccctaacttgctctcgatcctgccggtctcgtcccgcagagccggtgccatctgtgggggctttgggccaggggtctccggacagcatgagcgtgggcttcatcggcgctggccagctggcttttgccctggccaagggcttcacagcagcaggcgtcttggctgcccacaagataatggctagctccccagacatggacctggccacagtttctgctctcaggaagatgggggtgaagttgacaccccacaacaaggagacggtgcagcacagtgatgtgctcttcctggctgtgaagccacacatcatccccttcatcctggatgaaataggcgccgacattgaggacagacacattgtggtgtcctgcgcggccggcgtcaccatcagctccattgagaagaagctgtcagcgtttcggccagcccccagggtcatccgctgcatgaccaacactccagtcgtggtgcgggagggggccaccgtgtatgccacaggcacgcacgcccaggtggaggacgggaggctcatggagcagctgctgagcagcgtgggcttctgcacggaggtggaagaggacctgattgatgccgtcacggggctcagtggcagcggccccgcctacgcattcacagccctggatgccctggctgatgggggtgtgaagatgggacttccaaggcgcctggcagtccgcctcggggcccaggccctcctgggggctgccaagatgctgctgcactcagaacagcacccaggccagctcaaggacaacgtcagctctcctggtggggccaccatccatgccttgcatgtgctggagagtgggggcttccgctccctgctcatcaacgctgtggaggcctcctgcatccgcacacgggagctgcagtccatggctgaccaggagcaggtgtcaccagccgccatcaagaagaccatcctggacaaggaccaccttcctctagagctcgggagcccggagggtcttcacccactcctactccagtatcagctggcacgggctccttcctgagagcaaaggtcaaggaccccctctgtgaaggctcagcagaggtgggatcccacgccccctcccggcccctccctgccctccattcagggagaaacctctccttcccgtgtgagaagggccagagggtccaggcatcccaagtccagcgtgaagggccacagcccctcttggctgccaagcacgcagatcccatggacatttggggaaagggctccttgggctgctggtgaacttctgtggccaccacctcctgctcctgacctccctgggagggtgctatcagttctgtcctggccctttcagttttataagttggtttccagcccccagtgtcctgacttctgtctgccacatgaggagggaggccctgcctgtgtgggagggtggttactgtgggtggaatagtggaggccttcaactgattagacaaggcccgcccacatcttggagggcatctgccttactgattaaaatgtcaatgtaatctaaaaaaaaaaaaaaaaaaaaaaaaaaaaaaaaaaaaaaaaaaaaaaaaaaaa

SEQ ID NO: 118 - DNA, 6279 bp, Homo sapiens
gtgtgtgtggaggccagtatgaagctgaaaaagcaggtgacagtgtgtggggctgccatcttctgtgtggcagtcttctcgctctacctcatgctggaccgagtgcaacacgatcccacccgacaccagaatggtgggaacttcccccggagccaaatttctgtgctgcagaaccgcattgagcagctggagcagcttttggaggagaaccatgagattatcagccatatcaaggactccgtgctggagctgacagccaacgcagagggcccgcccgccatgctgccctactacacggtcaatggctcctgggtggtgccaccggagccccggcccagcttcttctccatctccccgcaggactgccagtttgctttggggggccggggtcagaagccagagctgcagatgctcactgtgtcggaggagctgccgtttgacaacgtggatggtggtgtgtggaggcaaggcttcgacatctcctacgacccgcacgactgggatgctgaagacctgcaggtgtttgtggtgccccactctcacaatgacccaggctggatcaagacctttgacaagtactacacagagcagacccaacacatcctcaatagcatggtgtctaagctgcaggaggacccccggcggcgcttcctctgggcagaggtctccttcttcgccaagtggtgggacaacatcaatgtccaaaagagagcggcagtccgaaggctggtgggaaacgggcagctggagattgcgacaggaggctgggtgatgccagatgaggccaattcccactactttgcattgattgaccagctcatcgaaggacaccagtggctggagagaaatcttggtgcaaccccccgctctggctgggcagtggacccctttggatacagctccaccatgccttacctgctgcgccgtgccaacctcaccagcatgctgattcagagagtgcactatgccatcaagaagcactttgctgccacccacagcctagagttcatgtggaggcagacatgggactcggactccagcacagacatcttctgtcacatgatgcccttctacagctatgacgtcccccatacctgtggcccagatcccaagatctgctgccaatttgatttcaaacgcctgcctggtgggcgcatcaactgcccttggaaggtgccaccccgggccatcacagaggccaacgtggcagagagggcagccctgcttctggaccaataccggaagaagtcccagctgttccgaagcaacgtcctcctggtgcctcttggagatgacttccgatatgacaagccccaggagtgggatgcccagttcttcaactaccaacggctctttgacttcttcaacagcaggcctaacctccatgtgcaggcccagtttggcactctttctgactattttgatgccctgtacaagaggacaggggtggagccaggggcccggcctccagggtttcctgtgctgagcggggatttcttctcctatgcggaccgggaggatcattactggacaggctattacacttcccggcccttctacaagagcttagaccgagtcctggaagcccacctgcggggggcagaggttctgtacagcctggctgcagctcacgctcgccgctctggtctggctggccggtacccactgtctgatttcaccctcctgacggaagctcggcgcacattggggctcttccagcatcacgatgccatcactggcacggccaaggaggctgtggtggtggactatggggtcaggcttctgcgctcccttgtcaacctgaagcaggtcatcattcatgcagcccactatctggtgctgggggacaaggagacctaccactttgaccctgaggcgcccttcctccaagtggatgacactcgcttaagtcacgacgccctcccagagcgcacggtgatccagctggattcctcgcccaggtttgtggtcctattcaacccactggaacaggagcgattcagcatggtgtccctgctggtcaactctccccgcgtgcgtgtcctttcggaggagggtcagcccctggccgtgcagatcagcgcacactggagctctgccaccgaggcggtccctgacgtctaccaggtgtctgtgcctgtccgcctgccagccctgggcctgggcgtgctgcagctacagctgggcctggatgggcaccgcacgctgccctcctctgtgcgcatctacctgcacggccggcagctgtccgtcagcaggcacgaagcgtttcctctccgtgtcattgactctggcaccagcgacttcgccctcagcaaccgctacatgcaggtctggttctcaggccttactgggctcctcaagagcatccgaagggtggatgaggagcacgagcagcaggtggacatgcaggtccttgtctatggcacccgtacgtccaaagacaagagtggagcctacctcttcctgcccgatggcgaggccaagccctacgtccccaaggagccccccgtgctgcgtgtcactgaaggccctttcttctcagaggtggttgcgtactatgagcacattcaccaggcggtccggctttacaatctgccaggggtggaggggctgtctctggacatatcatccctggtggacatccgggactacgtcaacaaggagctggccctgcacatccatacagacatcgacagccagggtatcttcttcacagacctcaatggctttcaggtgcagccccgacggtatctgaagaagctccccctccaggccaacttctaccccatgccagtcatggcctatatccaggacgcacagaagcgcctcacgctgcacactgcccaggccctgggtgtctctagcctcaaagatggccagctggaggtgatcttggaccggcggctgatgcaggatgacaaccggggcctaggccaagggctcaaggacaacaagagaacctgcaaccgtttccgcctcctgctagagcggcgaaccgtgggcagtgaggtccaagatagccactctaccagctacccatccctcctcagccacctgacctccatgtacctgaacgccccggcgctcgctctgcctgtagccaggatgcagctcccaggccctggtctgcgctcatttcatcctctggcttcctcactgccctgtgacttccacctgctcaacctacgtacgctccaggctgaggaggacaccctaccctcggcggagaccgcactcatcttacaccgcaagggttttgactgcggcctggaggccaagaacttgggcttcaactgcaccacaagccaaggcaaggtagccctgggcagccttttccatggcctggatgtggtattccttcagccaacctccttgacgttactgtaccctctggcctccccgtccaacagcactgacgtctatttggagcccatggagattgctacctttcgcctccgcttgggttagggcttcttgtggcctgaagagaaagttcattcacagagactgcctcttaacatgaagatcattggacaagccacacgggtatcccatcccgatctgcctcccagaactgtgacacactgggctctgccctcattttctgtttattgctgctgctgtgttttcggcgcaacccacaaacccagtgatgggtaaatagggcagacgccagtgagatcagggagagaaggcccttggtcagagtgggcagtgccaggctctgctttgggttgtgagtggacacccaactgggcacaggctcaggcacccatcctttttccaaacagggatatagaagtggtggaagcagacagaagaggtaagggaggctaagtgggtaacagcccagcatcagggtcactgtggcaacagcaggctctaggggaatcctgtggttatgtagagactccatgtcctggtgtgatgagcaggatcagagtgactctgggaggacaggggtggggacccagagttagcagtggggatggagcagtagaaggaatcactgtttctcctaggagtctgaaggcctcgctgctttctgtgatggctttgcagtaagtgccgcctggcctgcatgcattggctaacaggctgcagaatggcaggaaggactcgctagagattgtcatggccagagatcataggtcacttcaggtagcaagacccctggcaaactgggcacttggcctatgtactgatttgtgggatggtggcaggggtgtggggtccttcaccctgcctgaattctctttggcttctgtgctctgtatgctgctgtccccaagggctctttcttattatggcagggagtggggattggtcctactttctttctctggaaaggaaagcctccaagactccatgtgcttgggcagcttgagaaggcgttcagcaccacgcctagcaggcagaccttgaagcctcacctttagtctatctgcagaggtattcagttcctggcacaggggactaggggcatgtagagtatatgaggaggcagtatggctgtgcaggagccttcatttcagcttcaattaatagggaagaatttatgatagctctatagatgctgaaaaggtatttcgtaagatttaaaatccatcccttattaaaactcttagtaaattaagtctggaaagaaacaccctaatctagataaaggtctgtttcagaaaccaacagtgatggcattctaaagagtcagacgccacaggcattcccattaaagtcagaaactagccaagggcaagctattattcagcagtgtcccggcactactaacccctgcaacaagccagatgaggaacataaggaagaattataattgtcattatttgtagacaataaaactgcctacctgtaaaacctaagaatcaactgaagacctgttaagagtattctgtaagtcaacccaatgatacacatcatgttcctgtccacatactggttttccccaaatcagctgataaattcagtgtaattccaatgagattgaaactttggaattgacagttctaaagtgcatttgggagagtgaatgtgtgagaacactaagaccactctgaacgatgataatgagttggggggtggactgctcgggggtgatcctgccagattcccagaggattctcacgccaccattacctcactcagtgtgacctggagggggtcagacagacgggagagtccagaaacagacccagggctacaggaatttagtatatggtaagagggatgttttaagtggggaaaaaggtggattatttaataaacagcacttttagacaactagctatcaaagctagatctcagctgggtgcgatggctcacgcctgtaatcccggcactttgggaggccaaggtgggtggatcacttgaggtcaggagttcgagaccagcctggccaagatggcgaaaccctgtgtctactaaaaatacaaaaactagccaggaatggtggcgcgcgcctgtaatcccagttacttaggaggctgaggcaggagaatcacatcaacctgggaggcggaggttgcagtgagcttagatcatgccaccatgccactgcactccagcctgggtgacacagccaaaaaaaaaaccactaagttagatctctacctcacagtgtccatacaaattagttccagagggaagatataccacaaaattactcaaaaatttttatacctctggtgtgggacggtcttttctaaactttaacatgagacttaaaagatataataagggaaaagataagcagatttcgcaaccaaaaaatatcgaaagtctctgtgtgatggaaaacatcaaggttaaaacacaaatgacagatatggaagaaaatatttgcagcacataaaaaaatcaacgagtacaattactttaggagaaaagcttgcttcagggtccttagagaaagtcactggggcctgccaagctgccacctaaagacaagagtgagagggctgagttcttccaggtcatcagagttgttgctgcccgtattaggccacacagtggaaccccatttatatcatagcagaagaaataggattatcaatgtgaactgcttagcatggtgcctggtatatacgagagctccacaaatgtgagctataatcctactagtaaaggatgctaagcagttccactgtggcaggtgtcatttgctagtagaatttgtaatcaaacaataggaggggaatctgtgaacgcctagaaaatgagcagaataaaggatattatctttggaagtcttaaaaaaaaaaa

SEQ ID NO: 119 - DNA, 660 bp, Homo sapiens
atgaaccgactcttcgggaaagcgaaacccaaggctccgccgcccagcctgactgactgcattggcacggtggacagtagagcagaatccattgacaagaagatttctcgattggatgctgagctagtgaagtataaggatcagatcaagaagatgagagagggtcctgcaaagaatatggtcaagcagaaagccttgcgagttttaaagcaaaagaggatgtatgagcagcagcgggacaatcttgcccaacagtcattcaacatggaacaagccaattataccatccagtctttgaaggacaccaagaccacggttgatgctatgaaactgggagtaaaggaaatgaagaaggcatacaagcaagtgaagatcgaccagattgaggatttacaagaccagctagaggatatgatggaagatgcaaatgaaatccaagaagcactgagtcgcagttatggcaccccagaactggatgaagatgatttagaagcagagttggatgcactaggtgatgagcttctggctgatgaagacagttcttatttggatgaggcagcatctgcacctgcaattccagaaggtgttcccactgatacaaaaaacaaggatggagttctggtggatgaatttggattgccacagatccctgcttcatag

SEQ ID NO: 120 - DNA, 1851 bp, Homo sapiens
ctattctaggcacttcacaaaactggactcatacgatatctgtagttttgcgtctggcttctctattgaattcttaaaggggggtgggaactaagcagatcacaagggagctgcccacagaggtaaagacaaggtcaggcaccatgactcctgtgaggatgcagcactccctggcaggtcagacctatgccgtgcccctcatccagccagacctgcggcgagaggaggccgtccagcagatggcggatgccctgcagtacctgcagaaggtctctggagacatcttcagcaggatctcccagcgggtagagcagagccggagccaggtgcaggccattggagagaaggtctccttggcccaggccaagattgagaagatcaagggcagcaagaaggccatcaaggtgttctccagtgccaagtaccctgctccagagcgcctgcaggaatatggctccatcttcacgggcgcccaggaccctggcctgcagagacgcccccgccacaggatccagagcaagcaccgccccctggacgagcgggccctgcaggagaagctgaaggactttcctgtgtgcgtgagcaccaagccggagcccgaggacgatgcagaagagggacttgggggtcttcccagcaacatcagctctgtcagctccttgctgctcttcaacaccaccgagaacctgtacaagaagtatgtcttcctggaccccctggctggtgctgtaacaaagacccatgtgatgctgggggcagagacagaggagaagctgtttgatgcccccttgtccatcagcaagagagagcagctggaacagcaggtcccagagaactacttctatgtgccagacctgggccaggtgcctgagattgatgttccatcctacctgcctgacctgcccggcattgccaacgacctcatgtacagtgccgacctgggccccggcattgccccctctgcccctggcaccattccagaactgcccaccttccacactgaggtagccgagcctctcaaggtagacctacaagatggggtactaacaccacccccaccgcccccaccaccacccccagctcctgaggtgctggccagtgcacccccactcccaccctcaaccgcggcccctgtaggccaaggcgccaggcaggacgacagcagcagcagcgcatctccttcagtccagggagctcccagggaagtggtcgacccctccggtggccgggccactctgctagagtccatccgccaagctgggggcatcggcaaggccaagctgcgcagcgtgaaggagcgaaagctggagaagaagaagcagaaggagcaggagcaagtgagagccacgagccaaggtggggacttgatgtcggatctcttcaacaagctggtcatgaggcgcaagggcatctctgggaaaggacctggggctggtgaggggcccggaggagcctttgcccgcgtgtcagactccatccctcctctgccgccaccgcagcagccacaggcagaggaggacgaggacgactgggaatcgtagggggctccatgacaccttcccccccagacccagacttgggccgttgctctgacatggacacagccaggacaagctgctcagacctgcttccctgggagggggtgacggaaccagcagtgtgtggagaccagcttcaaggagcggaaggctggcttgaggccacacagctggggcggggacttgtctgcctgtacttcatggggggacggctccacccagcctgcgccactgtgttcttaagaggcttccagagaaaacggcacaccaatcaataaagaactgagcagaaaccaacaaaaaaaaaaaaaaa

SEQ ID NO: 121 - DNA, 2397 bp, Homo sapiens
gagggaggaggaggagtggggaccgggcggggggtggaggaagaggcctcgcgcagaggagggagcaattgaatttcaaacacaaacaactgcacgagcgcgcacccaccgcgccggagccttgccccgatccgcgcccgccccgtccgtgcggcgcgcgggcggagacgccgtggccgcgccggagctcgggccgggggccaccatcgaggcgggggccgcgcgagggccggagcggagcggcgccgccaccgccgcacgcgcaaacttgggctcgcgcttcccggcccggcgcggagcccggggcgcccggagccccgccatgtcgcgatccaaccggcagaaggagtacaaatgcggggacctggtgttcgccaagatgaagggctacccacactggccggcccggattgacgagatgcctgaggctgccgtgaaatcaacagccaacaaataccaagtcttttttttcgggacccacgagacggcattcctgggccccaaagacctcttcccttacgaggaatccaaggagaagtttggcaagcccaacaagaggaaagggttcagcgaggggctgtgggagatcgagaacaaccctactgtcaaggcttccggctatcagtcctcccagaaaaagagctgtgtggaagagcctgaaccagagcccgaagctgcagagggtgacggtgataagaaggggaatgcagagggcagcagcgacgaggaagggaagctggtcattgatgagccagccaaggagaagaacgagaaaggagcgttgaagaggagagcaggggacttgctggaggactctcctaaacgtcccaaggaggcagaaaaccctgaaggagaggagaaggaggcagccaccttggaggttgagaggccccttcctatggaggtggaaaagaatagcaccccctctgagcccggctctggccgggggcctccccaagaggaagaagaagaggaggatgaagaggaagaggctaccaaggaagatgctgaggccccaggcatcagagatcatgagagcctgtagccaccaatgtttcaagaggagcccccaccctgttcctgctgctgtctgggtgctactggggaaactggccatggcctgcaaactgggaacccctttcccaccccaacctgctctcctcttctactcacttttcccactccaagcccagcccatggagattgacctggatggggcaggccacctggctctcacctctaggtccccatactcctatgatctgagtcagagccatgtcttctccctggaatgagttgaggccactgtgttccttccgcttggagctattttccaggcttctgctggggcctgggacaactgctcccacctcctgacacccttctcccactctcctaggcattctggacctctgggttgggatcaggggtaggaatggaaaggatggagcatcaacagcagggtgggcttgtggggcctgggaggggcaatcctcaaatgcggggtgggggcagcacaggagggcggcctccttctgagctcctgtcccctgctacacctattatcccagctgcctagattcagggaaagtgggacagcttgtaggggaggggctcctttccataaatccttgatgattgacaacacccatttttccttttgccgaccccaagagttttgggagttgtagttaatcatcaagagaatttggggcttccaagttgttcgggccaaggacctgagacctgaagggttgactttacccatttgggtgggagtgttgagcatctgtccccctttagatctctgaagccacaaataggatgcttgggaagactcctagctgtcctttttcctctccacacagtgctcaaggccagcttatagtcatatatatcacccagacataaaggaaaagacacattttttaggaaatgtttttaataaaagaaaattacaaaaaaaaattttaaagacccctaaccctttgtgtgctctccattctgctccttccccatcgttgcccccatttctgaggtgcactgggaggctccccttctatttggggcttgatgactttctttttgtagctggggctttgatgttccttccagtgtcatttctcatccacataccctgacctggccccctcagtgttgtcaccagatctgatttgtaacccactgagaggacagagagaaataagtgccctctcccaccctcttcctactggtctctctatgcctctctacagtctcgtctcttttaccctggcccctctcccttgggctctgatgaaaaattgctgactgtagctttggaagtttagctctgagaaccgtagatgatttcagttctaggaaaataaaacccgttgattactataaaaaaaaaaa

SEQ ID NO: 122 - DNA, 1685 bp, Homo sapiens
gccgggcccagctgcggggcggaggcggaggcggaggagaggcctgcggcggcagggagcggcgggactgggagcgggcgccggagccgacccgagccgagccgagccgagccgagccggagcgggcggcgaaggccggcgcggcgagcagcaaccatgtcggtgttcgggaagctgttcggggctggagggggtaaggccggcaagggcggcccgaccccccaggaggccatccagcggctgcgggacacggaagagatgttaagcaagaaacaggagttcctggagaagaaaatcgagcaggagctgacggccgccaagaagcacggcaccaaaaacaagcgcgcggccctccaggcactgaagcgtaagaagaggtatgagaagcagctggcgcagatcgacggcacattatcaaccatcgagttccagcgggaggccctggagaatgccaacaccaacaccgaggtgctcaagaacatgggctatgccgccaaggccatgaaggcggcccatgacaacatggacatcgataaagttgatgagttaatgcaggacattgctgaccagcaagaacttgcagaggagatttcaacagcaatttcgaaacctgtagggtttggagaagagtttgacgaggatgagctcatggcggaattagaagaactagaacaggaggaactagacaagaatttgctggaaatcagtggacccgaaacagtccctctaccaaatgttccctctatagccctaccatcaaaacccgccaagaagaaagaagaggaggacgacgacatgaaggaattggagaactgggctggatccatgtaatggggtccagcgctggctgggcccagacagactgtggtggcctgcgcagcgagcaggcgtgtgcgtgtgtggggcaggcaggatgtggtgcaggcaggttccatcgctttcgactctcactccaaagcagtagggccgcgttgctgctcactctctgcatagcatggtctgcacctgggagatgggcggggggaggggggcgggcggggtgggaagtgcctgctgtttataatgttgaatttctgtaaaataaactgtatttgcaaatccaacattgagcttctggactacgctgactccactgctgaatcctcaatggaaagggtcgactggttgcagttgaaatgacctgaaatgtagcctctgtccttgtaagtcagttgacttgccgcacatctctttgtgtacttgtacggtactggcagaaaagtcatttttcaaaagccataggcttttccttgcccttagctgtaataatgcatctgattttgatttcctccagagctgtgtttctgtccatcacctgtgtattggccctgtgtttaccactctggcccactcctcacccccttgctcccctggtcttctggagtttgtgacattgatttgaaatggatggtgttctcttgagagcaagtgagattgttagaattaagttccaactatacagttttctaacatagctataaggtccttgttgctgtttgtgataactgatagataactcattggaaacgtgcatacatttatattcagatgaaattatggtttgcactgtctattaaatatctcgattaattttcaaaaaaaaaaaaaaaaaaaaaaaaaaaaaaaaaaaaaaaaaaaaaaaaaaa

SEQ ID NO: 123 - DNA, 852 bp, Homo sapiens
atggctgtgccacccacgtatgccgatcttggcaaatctgccagggatgtcttcaccaagggctatggatttggcttaataaagcttgatttgaaaacaaaatctgagaatggattggaatttacaagctcaggctcagccaacactgagaccaccaaagtgacgggcagtctggaaaccaagtacagatggactgagtacggcctgacgtttacagagaaatggaataccgacaatacactaggcaccgagattactgtggaagatcagcttgcacgtggactgaagctgaccttcgattcatccttctcacctaacactgggaaaaaaaatgctaaaatcaagacagggtacaagcgggagcacattaacctgggctgcgacatggatttcgacattgctgggccttccatccggggtgctctggtgctaggttacgagggctggctggccggctaccagatgaattttgagactgcaaaatcccgagtgacccagagcaactttgcagttggctacaagactgatgaattccagcttcacactaatgtgaatgacgggacagagtttggcggctccatttaccagaaagtgaacaagaagttggagaccgctgtcaatcttgcctggacagcaggaaacagtaacacgcgcttcggaatagcagccaagtatcagattgaccctgacgcctgcttctcggctaaagtgaacaactccagcctgataggtttaggatacactcagactctaaagccaggtattaaactgacactgtcagctcttctggatggcaagaacgtcaatgctggtggccacaagcttggtctaggactggaatttcaagcataa

SEQ ID NO: 124 - DNA, 4457 bp, Homo sapiens
gtcgcgggaggggcttccgccgcgagggggcggggccggccctcagagtcctctgacggccccagtcagggaatttcaatttgaaacctagcggagggaggaggcaggcgcggctgccggcggctgggactgaagagggacgggtcccgcggcgagcgagctcctgagcataagctgtggccatgactactgaagtaggctctgtgtctgaagtgaagaaggactctagccagttaggaacagatgcaaccaaggaaaaacctaaagaagtagcagaaaatcagcagaatcagtcttccgatccagaggaggaaaaaggttcccagccacctcctgcagctgaaagccaaagtagtctacgccgccagaagagagagaaggaaacatcggagagcaggggtatttctcggttcataccgccatggcttaagaagcaaaagtcatataccttagtagtggccaaagatggaggagataaaaaagagcctacccaagctgttgttgaagaacaggtcttagataaagaggaaccccttccagaagaacagagacaggctaagggtgatgctgaagaaatggctcagaagaaacaagagattaaagttgaagtcaaggaagaaaaaccctcagtgagcaaggaagaaaaaccctcagtgagcaaagtggagatgcagcctactgaattagtaagtaaggagagagaagagaaggtaaaagaaacacaggaagacaaattagaaggaggagcagcaaaaagggagaccaaggaagtgcagaccaatgagctgaaagcagagaaggcatctcaaaaagtcaccaagaagaccaaaactgtccagtgtaaagtgaccctcttagatggcaccgaatacagctgtgacctggagaaacatgccaagggacaagtgttatttgacaaagtgtgtgaacacctcaatctcttggagaaagactactttggacttttgtttcaggaaagccctgagcagaaaaactggttagatcctgctaaagaaataaagagacaactgagaaaccttccatggctattcacttttaatgtgaagttttatcctcctgatccttctcaattgactgaagatatcaccagatacttcttgtgccttcagctccggcaggacattgcctctggccgcctgccctgctcttttgtgactcatgctctcctgggatcctacaccctgcaggctgaacttggtgactatgacccagaagaacatggcagcatcgacctcagtgaattccagtttgcccctactcagactaaggagctggaagagaaggtggcagagctgcacaaaacccacaggggcttatcgccagcacaagctgattcccagttcttagaaaatgcaaagaggctttccatgtatggtgttgacctacatcatgccaaggactcagaaggtgtggacatcaagctgggcgtgtgtgctaatggacttctcatttacaaagacagactgcgaatcaatcgttttgcttggccgaaaatcttaaaaatttcctataaacgcagtaacttctacattaaagtcagaccggcagagctggaacagtttgagagtaccattggattcaaactgccaaaccaccgggcagcgaaaagactatggaaagtgtgcgtggagcatcatactttctacaggcttgtttctccagagcagccaccaaaagccaagttcctgaccttggggtccaaatttcgctatagtggccgcacccaagcacagacccgccaggccagcaccctcatagataggccagcaccacactttgagcgcacttctagtaaacgggtctccaggagtctagatggagctccgattggtgtcatggaccaaagtcttatgaaggattttcctggcgctgctggggagatttcagcctatggacctggacttgtcagcattgccgtggtacaagatggggacggcaggagggaagtgagaagcccaactaaagccccacatttgcagctcattgaaggaaagaaaaattccttgagagtagaaggggataatatttatgtcagacatagcaatttaatgttggaggaactggataaggcccaggaggacatactgaaacatcaggctagcattagtgaactcaagcgcaattttatggaatccacacctgagccgcgccctaatgaatgggaaaaacgacgtatcacacctctgtccctacagacacaagggagttcacatgagactctgaatatagtggaggagaagaagcgggcagaggttgggaaagacgaaagagtaatcacagaagaaatgaatggtaaagagatatcacctgggagtggtcctggggagattcgtaaggtggagcctgtgacacaaaaagactccacctccctgtcttctgagagcagcagcagcagcagtgagagtgaggaggaagacgtgggagagtaccgtccccaccaccgagtgaccgagggcaccatcagggaggaacaggagtatgaagaagaggtggaggaagaaccccgcccggcagccaaggtagtagagagggaggaagcagtgcccgaagccagcccagtcacacaagcaggtgccagtgtaatcacagtagaaacagtgatccaggaaaatgtaggtgcccaaaagatacccggagagaagagtgtacacgaaggcgctcttaagcaagacatgggagaagaagcagaggaagagccacagaaagttaacggagaggtgtcccatgttgacattgatgttttgccacaaattatttgttgttcagagccaccagtggtaaaaacagagatggtaacaatttctgatgcctcacaaaggacagaaatctccaccaaggaagtccccattgtccaaactgagaccaaaaccatcacatatgagtctccacagattgatggcggggctggtggtgattcgggcacgttactgaccgcacaaaccatcacatctgagtccgtgtcaacaacgacaaccacacacatcaccaagactgtaaaaggtggaatttctgaaacaagaattgagaaacgcattgtgatcacaggagatggagatattgatcatgaccaggcactggctcaggcgatcagggaagccagagagcagcaccctgacatgtcggtcacaagagtggtggtacacaaagaaacagagttggctgaggaaggggaagattaagtaagaaagtcattttttaaacaacactcaactttgtgaacccctgaagattttttgaccgttccaagtcttaatgccacaccactattccagcgaatttatgctacaactggtaacaatgaccagaagcctgaagaattaaaatgccaacaccaaacctttccttaccagctctggtctatattgctcccatgcatttaatatattattttgttttataaccacttctaaatattctcagttctttctttttgttgttgttaattaaggggttttggttttgttttctgtttactttgtgtgcaactacctgcttttaatgactcactttgatcaaatgacagtgaacaaagccagcccaagctggtaaggtgctgttcacttgaacaggtgctgttgcgcagaaaggaaactctgtgactaatttagatagtggctttccttcttctggattcttttcattgaattctcacagtaaatatttacggagttttcaaattgcagcaaatatactgtatgagaaaatattaatacagattaaaagcctttcttacatcttgaaaattttctaatatttgagaatttcacagggatgttttttatattggacccttttgactttccagtcctgtgactttctacttttagtagagagtcagaatctctggactggagaataatgaagaagttcactgactgtgcactgtgcttagagaccctgccgcaccacagtgccaatgcttgtcagacacatgcccttcggcagcattccagaacaggagggaagagaaagagaaaactttcttcccttctactaaaagattcaggcagcttaaaaccttagtgctttctttcttaacatacccacatttcaattctttccattatttgaacacttgggtagaactcttgctttgtattaaacctctttgtctacacatgtaaaacttaccttttgttattgagcaggcctatctctttcagatagttttatgattcacacaggtttgaggatgctggggagagggggagggggctgtggtggtgttctgttggttacaagaaagttataccatttaaagctggcaccagagacccgatagggacttattaactatattgaacattttttcctttgcctttgaccctatgtatagttacgatgccagattagatttatagcagcctcaagttgtattaaatgatattttgcttcctgtaatactattataaaataaagtttgtttattctctaaa

SEQ ID NO: 125 - DNA, 2302 bp, Homo sapiens
ggagagaccacactgccatgcctccctctgggccccgaggaaccctccttctgttgccgctgctgctgctgctcctgcttcgcgccgtgctggctgtccccctggagcgaggggcgcccaacaaggaggagacccctgcgactgagagtcccgacacaggcctgtactaccaccggtacctccaggaggtcatcgatgtactggagacggatgggcatttccgagagaagctgcaggctgccaatgcggaggacatcaagagcgggaagctgagccgagagctggactttgtcagccaccacgtccgcaccaagctggatgagctcaagcgacaggaggtgtcacggctgcggatgctgctcaaggccaagatggacgccgagcaggatcccaatgtacaggtggatcatctgaatctcctgaaacagtttgaacacctggaccctcagaaccagcatacattcgaggcccgcgacctggagctgctgatccagacggccacccgggaccttgcccagtacgacgcagcccatcatgaagagttcaagcgctacgagatgcttaaggaacacgagagacggcgttatctggagtcactgggagaggagcagagaaaggaggcggagaggaagctggaagagcaacagcgccggcaccgcgagcaccctaaagtcaacgtgcctggcagccaagcccagttgaaggaggtgtgggaggagctggatggactggaccccaacaggtttaaccccaagaccttcttcatactgcatgatatcaacagtgatggtgtcctggatgagcaggagctggaggcactcttcaccaaggagctggagaaagtgtacgacccaaagaatgaggaggacgacatgcgggagatggaggaggagcgactgcgcatgcgggagcatgtgatgaagaatgtggacaccaaccaggaccgcctcgtgaccctggaggagttcctcgcatccactcagaggaaggagtttggggacaccggggagggctgggagacagtggagatgcaccctgcctacaccgaggaagagctgaggcgctttgaagaggagctggctgcccgggaggcagagctgaatgccaaggcccagcgcctcagccaggagacagaggctctagggcggtcccagggccgcctggaggcccagaagagagagctgcagcaggctgtgctgcacatggagcagcggaagcagcagcagcagcagcagcaaggccacaaggccccggctgcccaccctgaggggcagctcaagttccacccagacacagacgatgtacctgtcccagctccagccggtgaccagaaggaggtggacacttcagaaaagaaacttctcgagcggctccctgaggttgaggtgccccagcatctgtgatcctccgggaccccagccctcaggattcctgatgctccaaggcgactgatgggcgctggatgaagtggcacagtcagcttccctgggggccggtgtcatgttgggctcctggggcgggggcacggcctggcatttcacgcattgctgccaccccaggtccacctgtctccactttcacagcctccaagtctgtggctcttcccttctgtcctccgaggggcttgccttctctcgtgtccagtgaggtgctcagtgatcggcttaacttagagaagcccgccccctccccttctccgtctgtcccaagagggtctgctctgagcctgcgttcctaggtggctcggcctcagctgcctgggttgtggccgccctagcatcctgtatgcccacagctactggaatccccgctgctgctccgggccaagcttctggttgattaatgagggcatggggtggtccctcaagaccttcccctaccttttgtggaaccagtgatgcctcaaagacagtgtcccctccacagctgggtgccaggggcaggggatcctcagtatagccggtgaaccctgataccaggagcctgggcctccctgaacccctggcttccagccatctcatcgccagcctcctcctggacctcttggcccccagccccttccccacacagccccagaagggtcccagagctgaccccactccaggacctaggcccagcccctcagcctcatctggagcccctgaagaccagtcccacccacctttctggcctcatctgacactgctccgcatcctgctgtgtgtcctgttccatgttccggttccatccaaatacactttctggaacaaaaaaaaaaaaaaaaaaaaaaaaaaaaaaaaaaaaaaaaaaaaaaaaaaaaaaa

SEQ ID NO: 126 - DNA, 1401 bp, Homo sapiens
atgtccaccaggtccgtgtcctcgtcctcctaccgcaggatgttcggcggcccgggcaccgcgagccggccgagctccagccggagctacgtgactacgtccacccgcacctacagcctgggcagcgcgctgcgccccagcaccagccgcagcctctacgcctcgtccccgggcggcgtgtatgccacgcgctcctctgccgtgcgcctgcggagcagcgtgcccggggtgcggctcctgcaggactcggtggacttctcgctggccgacgccatcaacaccgagttcaagaacacccgcaccaacgagaaggtggagctgcaggagctgaatgaccgcttcgccaactacatcgacaaggtgcgcttcctggagcagcagaataagatcctgctggccgagctcgagcagctcaagggccaaggcaagtcgcgcctgggggacctctacgaggaggagatgcgggagctgcgccggcaggtggaccagctaaccaacgacaaagcccgcgtcgaggtggagcgcgacaacctggccgaggacatcatgcgcctccgggagaaattgcaggaggagatgcttcagagagaggaagccgaaaacaccctgcaatctttcagacaggatgttgacaatgcgtctctggcacgtcttgaccttgaacgcaaagtggaatctttgcaagaagagattgcctttttgaagaaactccacgaagaggaaatccaggagctgcaggctcagattcaggaacagcatgtccaaatcgatgtggatgtttccaagcctgacctcacggctgccctgcgtgacgtacgtcagcaatatgaaagtgtggctgccaagaacctgcaggaggcagaagaatggtacaaatccaagtttgctgacctctctgaggctgccaaccggaacaatgacgccctgcgccaggcaaagcaggagtccactgagtaccggagacaggtgcagtccctcacctgtgaagtggatgcccttaaaggaaccaatgagtccctggaacgccagatgcgtgaaatggaagagaactttgccgttgaagctgctaactaccaagacactattggccgcctgcaggatgagattcagaatatgaaggaggaaatggctcgtcaccttcgtgaataccaagacctgctcaatgttaagatggcccttgacattgagattgccacctacaggaagctgctggaaggcgaggagagcaggatttctctgcctcttccaaacttttcctccctgaacctgagggaaactaatctggattcactccctctggttgatacccactcaaaaaggacacttctgattaagacggttgaaactagagatggacaggttatcaacgaaacttctcagcatcacgatgaccttgaataa

SEQ ID NO: 127 - DNA, 2866 bp, Homo sapiens
ctcatgaggagccactcagattcctgtcacttctcaaagcatctccgtcgtgaacatggccctgccaccattcttcggccagggtcgcccaggcccaccgcccccgcagccgccgcctcctgctcctttcggctgtccgccaccgccgctgccctccccggctttcccgccgcctctcccccagcggcccggcccttttccgggggcctccgcccccttccttcagcctccgctggctctgcagccccgagcctccgcggaggcctcccgcggcggaggcggcgctggcgccttctacccggtgccaccaccgccgctgcctcctccgccgccccagtgtcggcccttcccggggaccgacgccggcgagcggccgcggccaccgcctcccggcccggggccgccctggagcccgcggtggcctgaggcgccgccgccgccggccgacgtgctcggggatgcggccctccaacgcctgcgcgaccggcagtggctggaggcggtgttcgggaccccgcggcgggcaggctgtccggtgccccagcgcacgcatgccgggcccagccttggcgaagtgcgcgcgcgattgctccgggctctgcgcctggtgcggcggctgcgcggcctgagccaggccctgcgcgaggccgaagccgacggcgcggcctgggtcctgctgtactcccagaccgcgccgctgcgcgcggaactggccgagcggctacagccgttgacccaggctgcctatgtgggcgaggcgcggaggaggctggagagggtccggcgccgccggctgcggcttcgcgagagggcccgggaacgcgaggccgagcgggaggcagaggccgcgcgggcagtggaacgcgagcaggagattgaccgctggagggtgaagtgtgtgcaggaggtggaggagaagaagcgggagcaggaactcaaagcagccgctgatggcgtactatctgaagtgaggaaaaaacaagcagataccaaaagaatggtggacattctacgggctttggagaaattgaggaaactgaggaaagaggctgcagcgaggaaaggggtctgtcctccagcctcagcagatgagacttttacgcatcatcttcagcgactgagaaaactcattaaaaagcgctctgaactgtatgaagctgaagagagagccctcagagttatgctagaaggagaacaagaggaagagaggaaaagagaattagaaaagaaacaaagaaaagaaaaagagaaaattttacttcagaaacgtgaaattgagtccaagttgtttggggatccagatgagttcccacttgctcacctcttggagcctttccgacagtattatctccaagccgagcactccctgccagcgctcatccagatcaggcatgattgggatcagtacctggtgccatccgatcatcccaaaggcaacttcgttccccaaggatgggtccttcccccgctccccagcaacgacatctgggcaactgctgttaagctgcattagtaaagatgctccaggagtgtggtccagccagcgctctttccagctgtaaatattagcgatggtgccatcttttgctgtagactaaactgcaacttctaaattccatgtggcattcccctaccctgaagttatgctttccttctgtgctctgtgctggccagaggtgcctcttgaatcagattaatgtggtttttcaggaaaggacttaggtgaactgaggtttttaccacaggcagtgaatgaccttggttcaccaaatttgcctctgttttgaggggcttggtccagagtgacttgttaatttactctaacttccttgtgtgttgatgggtaagtacactcaaacactgaatacaggtgtgtgatgggtagatttcacagcccttctactaatagtgagtgtgaaggcaagcttgatgcaaaacctcctgacctttcctacctgaagagccctttgacttctaggaagaaaggtcaaaaatgttatcttcagttgtgttaatcccagttttagtgcagcttaggaggctgctagttaggaagatggcagtggctgtaggctgggttgccagaaaagatggtggcctagtcttattattcagatggagaacttagaaaacctgaagagtacccaaattggattgtattttaatggacaatggctgtattttttccatgttagaaggatcctaatgaaagcacctgttatttttaagtttctaagggtctagttgttcagaatccccaaggatatttccctaacctcactcagtcacattgtaggagccagtgtagctatggaattatcttaggaactcaagcttctaaaactatccatgtagtcaaatctaggggaaaaagcaaataaaaatagtaaaatttggccgggcacagtggctcacgcctgtaatcccaacactttgggaggccgaggcgggccgatcacgaggtcaggagatcaaggccatcctggctaacacggtgaaaccctgtctctactaaaaatacaaaaaaatattagctgggcgtaggtggtgcacacctgtagtcccagctactggggaggctgaggcaggagaatggtgtaaaacccaggaggcagagcttgcagtgagccgagatcgcgccacggcactccagcctgggagacagagcaagactccgtctcaaaaaaaaaaaaagtaaaatttattttttatattcattaataaatgctgttgtgcttggagatgatcactcatataacatgtcatttttttggttctgttttggtttggtttttgccaattattttgttatatttccaaaaaactaaataaaaatcatttttattttttaaaaaaaaaaaaaaaa

SEQ ID NO: 128 - DNA, 944 bp, Homo sapiens; identical to SEQ ID NO: 37

SEQ ID NO: 129 - DNA, 482 bp, Homo sapiens; identical to SEQ ID NO: 38

SEQ ID NO: 130 - DNA, 1089 bp, Homo sapiens; identical to SEQ ID NO: 39
  misc_feature (806)..(806): n is a, c, g, or t
  misc_feature (905)..(905): n is a, c, g, or t
  misc_feature (916)..(916): n is a, c, g, or t
  misc_feature (925)..(925): n is a, c, g, or t
  misc_feature (928)..(929): n is a, c, g, or t
  misc_feature (961)..(961): n is a, c, g, or t
  misc_feature (973)..(973): n is a, c, g, or t
  misc_feature (1005)..(1005): n is a, c, g, or t
  misc_feature (1007)..(1007): n is a, c, g, or t
  misc_feature (1011)..(1011): n is a, c, g, or t
  misc_feature (1014)..(1014): n is a, c, g, or t
  misc_feature (1017)..(1017): n is a, c, g, or t
  misc_feature (1023)..(1023): n is a, c, g, or t
  misc_feature (1037)..(1037): n is a, c, g, or t
  misc_feature (1040)..(1040): n is a, c, g, or t
  misc_feature (1043)..(1043): n is a, c, g, or t
  misc_feature (1047)..(1048): n is a, c, g, or t
  misc_feature (1055)..(1056): n is a, c, g, or t
  misc_feature (1059)..(1059): n is a, c, g, or t
  misc_feature (1087)..(1088): n is a, c, g, or t

SEQ ID NO: 131 - DNA, 752 bp, Homo sapiens; identical to SEQ ID NO: 40

SEQ ID NO: 132 - DNA, 3078 bp, Homo sapiens
atggccgggacgtacagctcgactctgaagacgctggaggacttgaccttggactccgggtatggggccggggactcgtgccgctcgctcagcctctcgtcctccaagtccaactcgcaggcgctcaactcttcggcgcagcagcaccgcggggcggcctggtggtgctactccggctccatgaacagccgccacaacagctgggacacggtgaacacggtgctgcccgaggaccccgaagtggccgacctcttctcgcgctgtccgcggctccccgagctggaggagttcccctggaccgaaggagacgtggcccgggtgctccgcaaaggcgctggcggccggcggctgccccagttctccgccgaggcggtgaggcgcctggccgggctgctccgcagggcactgatccgcgtggcccgcgaggcgcagcgcctgagcgtgctgcacgccaagtgcacccgctttgaggtgcagagcgccgtgcgcctggtgcacagctgggcgctggccgagagctgcgcgctggcagccgtcaaggcgctgtccctgtacagcatgagcgccggcgacgggctgcgccggggcaagtccgcgcgctgcggcctcaccttctcagtgggtcgctttttccgctggatggtggacacccgaatctccgtgcgcatccacgagtacgcagccatctccctcaccgcctgcatggagaacctggtggaggagatccgggccagggtgatggccagccacagccctgatggcggaggggccggaggcggggaggtgtctgctgaggccctggagatggtcatcaacaacgacgccgagctctggggcgtcttgcagccctatgagcatctcatctgcggcaagaacgccaatggtgtcctctccctccccgcatacttcagcccctacaacggcgggtccctgggccatgacgagcgagccgatgcctatgcccagctggagctccgaaccctggagcagtccctcctggccacctgcgtgggcagcatctcggagctgagtgacttggtctcccgtgccatgcaccacatgcaggggcgtcaccccctgtgcccgggtgccagccctgcccgccaggcccgccagccgccacagcccatcacttggtcccccgacgccctccacacgctctactactttctgcggtgtccacagatggagtccatggagaaccccaacctggaccccccgagaatgaccttgaacaatgaacggcccttcatgctgctgccgcccctcatggagtggatgcgcgtggccatcacctacgcagagcaccgccgcagcctcaccgtggacagcggcgacatccggcaggcagcccggctgctgctgcctggtctggactgtgaacctcggcagctcaaacccgaacactgtttcagttccttccggaggctggatgcccgagcagctactgaaaaattcaaccaggacctgggtttccgcatgctcaactgtgggaggacggacctcatcaaccaagccatcgaggccttgggtccggatggggttaacaccatggatgaccagggtatgacgccactgatgtacgcctgcgctgctggggacgaagcgatggtccagatgttgattgatgctggggcaaacttggacatccaggttccaagcaactcccccaggcacccttccatccaccccgacagccggcactggacctcactgacattcgctgtgctgcatggacacatctctgtggtccagttgctgctggatgctggtgcccatgtcgagggctcggcagtgaacggcggcgaggacagctatgcggagacgcccctgcagctggcctctgcggcagggaactatgagctggtcagtttgttgctgagccgaggcgccgaccccctcctcagcatgctggaggcccacggcatgggctcctccctccacgaggacatgaactgcttcagccactcagctgcccacggccacaggaacgtcctgaggaagctcctgacgcagccacagcaggctaaagcggacgtgctgtccctggaggagatcctggccgagggtgtggaggaaagtgatgcgtcgagccagggcagtggcagcgaggggcccgtgcggctgagccggacccgcaccaaggccctacaggaggccatgtactacagcgctgagcacggctacgtggacatcaccatggagctgagggcactgggagtcccctggaagctgcacatctggatcgagtctctgaggacctcgttctcgcagtcgcggtactcggtggtgcagagcctcctgcgggacttcagctccatcagagaggaggagtacaacgaggagctggtgaccgagggcttgcagctcatgttcgacatcctcaagaccagcaaaaacgactccgtcatccagcaactggctaccatcttcacccactgctatggcagcagtcccatccccagcatcccagagatccggaagaccctgccggccaggctagatccacactttttgaacaataaggagatgtcagatgtgaccttcctggtggaaggaaagctgttttatgcacataaagtcctgctggtgacagcttctaacaggttcaagacactaatgaccaataaatcagaacaggatggggacagcagcaagaccatcgagatcagcgacatgaagtaccacatttttcagatgatgatgcagtatctgtactacggaggaacagaatccatggagatccccaccactgacatcctggagctgctgtcagctgccagcctgttccagctggatgccctgcagaggcactgcgagatcctgtgctcccagaccctcagcatggagagtgccgtgaacacctacaaatatgccaagatccacaatgccccagaactggccctgttctgtgagggcttcttcctcaagcacatgaaggccctactggagcaggatgccttccggcagctcatctacggccgcagcagcaaagtgcagggcctggatccactgcaggacctgcagaacaccctggcagagcgcgtgcactctgtctacatcacctcccgggtgtga

SEQ ID NO: 133 - DNA, 765 bp, Homo sapiens
atgttccaccaggtgagaagagtgatgaccatccttttccttactatggttatttcatactttggttgcatgaaggctgcccccatgaaagaagcaaacatccgaggacaaggtggcttggcctacccaggtgtgcggacccatgggactctggagagcgtgaatgggcccaaggcaggttcaagaggcttgacatcattggctgacactttcgaacacgtgatagaagagctgttggatgaggaccagaaagttcggcccaatgaagaaaacaataaggacgcagacttgtacacgtccagggtgatgctcagtagtcaagtgcctttggagcctcctcttctctttctgctggaggaatacaaaaattacctagatgctgcaaacatgtccatgagggtccggcgccactctgaccctgcccgccgaggggagctgagcgtgtgtgacagtattagtgagtgggtaacggcggcagacaaaaagactgcagtggacatgtcgggcgggacggtcacagtccttgaaaaggtccctgtatcaaaaggccaactgaagcaatacttctacgagaccaagtgcaatcccatgggttacacaaaagaaggctgcaggggcatagacaaaaggcattggaactcccagtgccgaactacccagtcgtacgtgcgggcccttaccatggatagcaaaaagagaattggctggcgattcataaggatagacacttcttgtgtatgtacattgaccattaaaaggggaaga

SEQ ID NO: 134 - DNA, 4207 bp, Homo sapiens; identical to SEQ ID NO: 104

SEQ ID NO: 135 - DNA, 963 bp, Homo sapiens; identical to SEQ ID NO: 89

SEQ ID NO: 136 - DNA, 7889 bp, Homo sapiens
gtgcaggctgctcccggggtaggtgagggaagcgcggaggcggcgcgcgggggcagtggtcggcgagcagcgcggtcctcgctaggggcgcccacccgtcagtctctccggcgcgagccgccgccaccgcccgcgccggagtcaggcccctgggcccccaggctcaagcagcgaagcggcctccgggggacgccgctaggcgagaggaacgcgccggtgcccttgccttcgccgtgacccagcgtgcgggcggcgggatgagagggagccatcgggccgcgccggccctgcggccccgggggcggctctggcccgtgctggccgtgctggcggcggccgccgcggcgggctgtgcccaggcagccatggacgagtgcacggacgagggcgggcggccgcagcgctgcatgcccgagttcgtcaacgccgccttcaacgtgactgtggtggccaccaacacgtgtgggactccgcccgaggaatactgtgtgcagaccggggtgaccggggtcaccaagtcctgtcacctgtgcgacgccgggcagccccacctgcagcacggggcagccttcctgaccgactacaacaaccaggccgacaccacctggtggcaaagccagaccatgctggccggggtgcagtaccccagctccatcaacctcacgctgcacctgggaaaagcttttgacatcacctatgtgcgtctcaagttccacaccagccgcccggagagctttgccatttacaagcgcacacgggaagacgggccctggattccttaccagtactacagtggttcctgtgagaacacctactccaaggcaaaccgcggcttcatcaggacaggaggggacgagcagcaggccttgtgtactgatgaattcagtgacatttctcccctcactgggggcaacgtggccttttctaccctggaaggaaggcccagcgcctataactttgacaatagccctgtgctgcaggaatgggtaactgccactgacatcagagtaactcttaatcgcctgaacacttttggagatgaagtgtttaacgatcccaaagttctcaagtcctattattatgccatctctgattttgctgtaggtggcagatgtaaatgtaatggacacgcaagcgagtgtatgaagaacgaatttgataagctggtgtgtaattgcaaacataacacatatggagtagactgtgaaaagtgtcttcctttcttcaatgaccggccgtggaggagggcaactgcggaaagtgccagtgaatgcctgccctgtgattgcaatggtcgatcccaggaatgctacttcgaccctgaactctatcgttccactggccatgggggccactgtaccaactgccaggataacacagatggcgcccactgtgagaggtgccgagagaacttcttccgccttggcaacaatgaagcctgctcttcatgccactgtagtcctgtgggctctctaagcacacagtgtgatagttacggcagatgcagctgtaagccaggagtgatgggggacaaatgtgaccgttgccagcctggattccattctctcactgaagcaggatgcaggccatgctcttgtgatccctctggcagcatagatgaatgtaatattgaaacaggaagatgtgtttgcaaagacaatgtcgaaggcttcaattgtgaaagatgcaaacctggattttttaatctggaatcatctaatcctcggggttgcacaccctgcttctgctttgggcattcttctgtctgtacaaacgctgttggctacagtgtttattctatctcctctacctttcagattgatgaggatgggtggcgtgcggaacagagagatggctctgaagcatctctcgagtggtcctctgagaggcaagatatcgccgtgatctcagacagctactttcctcggtacttcattgctcctgcaaagttcttgggcaagcaggtgttgagttatggtcagaacctctccttctcctttcgagtggacaggcgagatactcgcctctctgcagaagaccttgtgcttgagggagctggcttaagagtatctgtacccttgatcgctcagggcaattcctatccaagtgagaccactgtgaagtatgtcttcaggctccatgaagcaacagattacccttggaggcctgctcttaccccttttgaatttcagaagctcctaaacaacttgacctctatcaagatacgtgggacatacagtgagagaagtgctggatatttggatgatgtcaccctggcaagtgctcgtcctgggcctggagtccctgcaacttgggtggagtcctgcacctgtcctgtgggatatggagggcagttttgtgagatgtgcctctcaggttacagaagagaaactcctaatcttggaccatacagtccatgtgtgctttgcgcctgcaatggacacagcgagacctgtgatcctgagacaggtgtttgtaactgcagagacaatacggctggcccgcactgtgagaagtgcagtgatgggtactatggagattcaactgcaggcacctcctccgattgccaaccctgtccgtgtcctggaggttcaagttgtgctgttgttcccaagacaaaggaggtggtgtgcaccaactgtcctactggcaccactggtaagagatgtgagctctgtgatgatggctactttggagaccccctgggtagaaacggccctgtgagactttgccgcctgtgccagtgcagtgacaacatcgatcccaatgcagttggaaattgcaatcgcttgacgggagaatgcctgaagtgcatctataacactgctggcttctattgtgaccggtgcaaagacggattttttggaaatcccctggctcccaatccagcagacaaatgcaaagcctgcaattgcaatctgtatgggaccatgaagcagcagagcagctgtaaccccgtgacggggcagtgtgaatgtttgcctcacgtgactggccaggactgtggtgcttgtgaccctggattctacaatctgcagagtgggcaaggctgtgagaggtgtgactgccatgccttgggctccaccaatgggcagtgtgacatccgcaccggccagtgtgagtgccagcccggcatcactggtcagcactgtgagcgctgtgaggtcaaccactttgggtttggacctgaaggctgcaaaccctgtgactgtcatcctgagggatctctttcacttcagtgcaaagatgatggtcgctgtgaatgcagagaaggctttgtgggaaatcgctgtgaccagtgtgaagaaaactatttctacaatcggtcttggcctggctgccaggaatgtccagcttgttaccggctggtaaaggataaggttgctgatcatagagtgaagctccaggaattagagagtctcatagcaaaccttggaactggggatgagatggtgacagatcaagccttcgaggatagactaaaggaagcagagagggaagttatggacctccttcgtgaggcccaggatgtcaaagatgttgaccagaatttgatggatcgcctacagagagtgaataacactctgtccagccaaattagccgtttacagaatatccggaataccattgaagagactggaaacttggctgaacaagcgcgtgcccatgtagagaacacagagcggttgattgaaatcgcatccagagaacttgagaaagcaaaagtcgctgctgccaatgtgtcagtcactcagccagaatctacaggggacccaaacaacatgactcttttggcagaagaggctcgaaagcttgctgaacgtcataaacaggaagctgatgacattgttcgagtggcaaagacagccaatgatacgtcaactgaggcatacaacctgcttctgaggacactggcaggagaaaatcaaacagcatttgagattgaagagcttaataggaagtatgaacaagcgaagaacatctcacaggatctggaaaaacaagctgcccgagtacatgaggaggccaaaagggccggtgacaaagctgtggagatctatgccagcgtggctcagctgagccctttggactctgagacactggagaatgaagcaaataacataaagatggaagctgagaatctggaacaactgattgaccagaaattaaaagattatgaggacctcagagaagatatgagagggaaggaacttgaagtcaagaaccttctggagaaaggcaagactgaacagcagaccgcagaccaactcctagcccgagctgatgctgccaaggccctcgctgaagaagctgcaaagaagggacgggataccttacaagaagctaatgacattctcaacaacctgaaagattttgataggcgtgtgaacgataacaagacggccgcagaggaggcactaaggaagattcctgccatcaaccagaccatcactgaagccaatgaaaagaccagagaagcccagcaggccctgggcagtgctgcggcggatgccacagaggccaagaacaaggcccatgaggcggagaggatcgcgagcgctgtccaaaagaatgccaccagcaccaaggcagaagctgaaagaacttttgcagaagttacagatctggataatgaggtgaacaatatgttgaagcaactgcaggaagcagaaaaagagctaaagagaaaacaagatgacgctgaccaggacatgatgatggcagggatggcttcacaggctgctcaagaagccgagatcaatgccagaaaagccaaaaactctgttactagcctcctcagcattattaatgacctcttggagcagctggggcagctggatacagtggacctgaataagctaaacgagattgaaggcaccctaaacaaagccaaagatgaaatgaaggtcagcgatcttgataggaaagtgtctgacctggagaatgaagccaagaagcaggaggctgccatcatggactataaccgagatatcgaggagatcatgaaggacattcgcaatctggaggacatcaggaagaccttaccatctggctgcttcaacaccccgtccattgaaaagccctagtgtctttagggctggaaggcagcatccctctgacaggggggcagttgtgaggccacagagtgccttgacacaaagattacatttttcagacccccactcctctgctgctgtccatgactgtccttttgaaccaggaaaagtcacagagtttaaagagaagcaaattaaacatcctgaatcgggaacaaagggttttatctaataaagtgtctcttccattcacgttgctaccttacccacactttcccttctgatttgcgtgaggacgtggcatcctacgttactgtacagtggcataagcacatcgtgtgagcccatgtatgctggggtagagcaagtagccctcccctgtctcatcgataccagcagaacctcctcagtctcagtactcttgtttctatgaaggaaaagtttggctactaacagtagcattgtgatggccagtatatccagtccatggataaagaaaatgcatctgcatctcctacccctcttccttctaagcaaaaggaaataaacatcctgtgccaaaggtattggtcatttagaatgtcggtagccatccatcagtgcttttagttattatgagtgtaggacactgagccatccgtgggtcaggatgcaattatttataaaagtctccaggtgaacatggctgaagatttttctagtatattaataattgactaggaagatgaactttttttcagatctttgggcagctgataatttaaatctggatgggcagcttgcactcaccaatagaccaaaagacatcttttgatattcttataaatggaacttacacagaagaaatagggatatgataaccactaaaattttgttttcaaaatcaaactaattcttacagcttttttattagttagtcttggaactagtgttaagtatctggcagagaacagttaatccctaaggtcttgacaaaacagaagaaaaacaagcctcctcgtcctagtcttttctagcaaagggataaaacttagatggcagcttgtactgtcagaatcccgtgtatccatttgttcttctgttggagagatgagacatttgacccttagctccagttttcttctgatgtttccatcttccagaatccctcaaaaaacattgtttgccaaatcctggtggcaaatacttgcactcagtatttcacacagctgccaacgctatcgagttcctgcactttgtgatttaaatccactctaaaccttccctctaagtgtagagggaagacccttacgtggagtttcctagtgggcttctcaacttttgatcctcagctctgtggttttaagaccacagtgtgacagttccctgccacacacccccttcctcctaccaacccacctttgagattcatatatagcctttaacactatgcaactttgtactttgcgtagcaggggcggggtggggggaaagaaactattatctgacacactggtgctattaattatttcaaatttatatttttgtgtgaatgttttgtgttttgtttatcatgattatagaataaggaatttatgtaaatatacttagtcctatttctagaatgacactctgttcactttgctcaatttttcctcttcactggcacaatgtatctgaatacctccttccctcccttctagaattctttggattgtactccaaagaattgtgccttgtgtttgcagcatctccattctctaaaattaatataattgctttcctccacacccagccactgtaaagaggtaacttgggtcctcttccattgcagtcctgatgatcctaacctgcagcacggtggttttacaatgttccagagcaggaacgccaggttgacaagctatggtaggattaggaaagtttgctgaagaggatctttgacgccacagtgggactagccaggaatgagggagaaatgccctttctggcaattgttggagctggataggtaagttttataagggagtacattttgactgagcacttagggcatcaggaacagtgctacttactgatgggtagactgggagaggtggtgtaacttagttcttgatgatcccacttcctgtttccatctgcttgggatataccagagtttaccacaagtgttttgacgatatactcctgagctttcactctgctgcttctcccaggcctcttctactatggcaggagatgtggcgtgctgttgcaaagttttcacgtcattgtttcctggctagttcatttcattaagtggctacatcctaacatatgcatttggtcaaggttgcagaagaggactgaagattgactgccaagctagtttgggtgaagttcactccagcaagtctcaggccacaatggggtggtttggtttggtttccttttaactttctttttgttatttgcttttctcctccacctgtgtggtatattttttaagcagaattttattttttaaaataaaaggttctttacaagatgataccttaattacactcccgcaacacagccattattttattgtctagctccagttatctgtattttatgtaatgtaattgacaggatggctgctgcagaatgctggttgacacagggattattatactgctatttttccctgaatttttttcctttgaattccaactgtggaccttttatatgtgccttcactttagctgtttgccttaatctctacagccttgctctccggggtggttaataaaatgcaacacttggcatttttatgttttaagaaaaacagtattttatttataataaaatctgaatatttgtaacccttta

SEQ ID NO: 137 - DNA, 10719 bp, Homo sapiens; identical to SEQ ID NO: 105

SEQ ID NO: 138 - DNA, 2869 bp, Homo sapiens
agaattctttggcaggggcgaccttagaatcctggggaggagcgagaatggaatcccggggaggaacaggggtggaatccggggggcggggtcagaacgccaggagggggcggggccggagccagggtcggcttgactcgggggagcagcgggtggatcctgtgacgtcagcgggttcgaaccgccggagctgagcgagaggccgggggtgccgagccgggcggggagagctgggccgggagagcagaacagggaggctagagcgcagcgggaaccggcccggagccggagccggagccccacaggcacctactaaaccgcccagccgatcggcccccacagagtggcccgcgggcctccggccgggcccagtcccctcccgggccctccatggcccgggccgctgccctcctgccgtcgagatcgccgccgacgccgctgctgtggccgctgctgctgctgctgctcctggaaaccggagcccaggatgtgcgagttcaagtgctacccgaggtgcgaggccagctcgggggcaccgtggagctgccgtgccacctgctgccacctgttcctggactgtacatctccctggtgacctggcagcgcccagatgcacctgcgaaccaccagaatgtggccgccttccaccctaagatgggtcccagcttccccagcccgaagcctggcagcgagcggctgtccttcgtctctgccaagcagagcactgggcaagacacagaggcagagctccaggacgccacgctggccctccacgggctcacggtggaggacgagggcaactacacttgcgagtttgccaccttccccaaggggtccgtccgagggatgacctggctcagagtcatagccaagcccaagaaccaagctgaggcccagaaggtcacgttcagccaggaccctacgacagtggccctctgcatctccaaagagggccgcccacctgcccggatctcctggctctcatccctggactgggaagccaaagagactcaggtgtcagggaccctggccggaactgtcactgtcaccagccgcttcaccttggtgccctcgggccgagcagatggtgtcacggtcacctgcaaagtggagcatgagagcttcgaggaaccagccctgatacctgtgaccctctctgtacgctaccctcctgaagtgtccatctccggctatgatgacaactggtacctcggccgtactgatgccaccctgagctgtgacgtccgcagcaacccagagcccacgggctatgactggagcacgacctcaggcaccttcccgacctccgcagtggcccagggctcccagctggtcatccacgcagtggacagtctgttcaataccaccttcgtctgcacagtcaccaatgccgtgggcatgggccgcgctgagcaggtcatctttgtccgagagacccccaacacagcaggcgcaggggccacaggcggcatcatcgggggcatcatcgccgccatcattgctactgctgtggctgccacgggcatccttatctgccggcagcagcggaaggagcagacgctgcagggggcagaggaggacgaagacctggagggacctccctcctacaagccaccgaccccaaaagcgaagctggaggcacaggagatgccctcccagctcttcactctgggggcctcggagcacagcccactcaagaccccctactttgatgctggcgcctcatgcactgagcaggaaatgcctcgataccatgagctgcccaccttggaagaacggtcaggacccttgcaccctggagccacaagcctggggtcccccatcccggtgcctccagggccacctgctgtggaagacgtttccctggatctagaggatgaggagggggaggaggaggaagagtatctggacaagatcaaccccatctatgatgctctgtcctatagcagcccctctgattcctaccagggcaaaggctttgtcatgtcccgggccatgtatgtgtgagctgccatgcgcctggcgtctcacatctcacctgttgatcccttagctttcttgccaaggatctagtgccccctgacctctggccaggccactgtcagttaacacatatgcattccatttgtgatgtctaccttggtggctccactatgacccctaacccatgagcccagagaaattcaccgtgataatggaatcctggcaaccttatctcatgaggcaggaggtggggaaggtgcttctgcacaacctctgatcccaaggactcctctcccagactgtgaccttagaccatacctctcaccccccaatgcctcgactcccccaaaatcacaaagaagaccctagacctataatttgtcttcaggtagtaaattcccaataggtctgctggagtgggcgctgagggctccctgctgctcagacctgagccctccaggcagcagggtcccacttaccccctccccaccctgttccccaaaggtgggaaagaggggattccccagcccaaggcagggttttcccagcaccctcctgtaagcagaagtctcagggtccagacccttccctgagcccccacccccaccccaattcctgcctaccaagcaagcagccccagcctagggtcagacagggtgagcctcatacagactgtgccttgatggccccagccttgggagaagaatttactgttaacctggaagactactgaatcattttacccttgcccagtggaataggacctaaacatcccccttccggggaaagtgggtcatctgaattgggggtagcaattgatactgttttgtaaactacatttcctacaaaatatgaatttatactttgaccaggaaaaaaaaaaaaa

SEQ ID NO: 139 - DNA, 4581 bp, Homo sapiens; identical to SEQ ID NO: 110

SEQ ID NO: 140 - DNA, 735 bp, Homo sapiens; identical to SEQ ID NO: 92

SEQ ID NO: 141 - DNA, 3303 bp, Homo sapiens
gttgctgatctttggatgttctggttagtctaagaaggagagtatgaggcgagctccggcccgggtgcggccgggcttcaggggcccaggcgccgctgctgccaccgccatctaacgctgcgccctggaggcccggcgcgcggatggtgccggtgcggctcgggtgttgaaacgggtgtcccctccccctcctcccctcccccacgcggtggtctcccctcccacccggctcaggcagagccatgtctcggggtggctcctacccacacctgttgtgggacgtgaggaaaaggtccctcgggctggaggacccgtcccggctgcggagtcgctacctgggaagaagagaatttatccaaagattaaaacttgaagcaacccttaatgtgcatgatggttgtgttaatacaatctgttggaatgacactggagaatatattttatctggctcagatgacaccaaattagtaattagtaatccttacagcagaaaggttttgacaacaattcgttcagggcaccgagcaaacatatttagtgcaaagttcttaccttgtacaaatgataaacagattgtatcctgctctggagatggagtaatattttataccaacgttgagcaagatgcagaaaccaacagacaatgccaatttacgtgtcattatggaactacttatgagattatgactgtacccaatgacccttacacttttctctcttgtggtgaagatggaactgttaggtggtttgatacacgcatcaaaactagctgcacaaaagaagattgtaaagatgatattttaattaactgtcgacgtgctgccacgtctgttgctatttgcccaccaataccatattaccttgctgttggttgttctgacagctcagtacgaatatatgatcggcgaatgctgggcacaagagctacagggaattatgcaggtcgagggactactggaatggttgcccgttttattccttcccatcttaataataagtcctgcagagtgacatctctgtgttacagtgaagatggtcaagagattctcgttagttactcttcagattacatatatctttttgacccgaaagatgatacagcacgagaacttaaaactccttctgcggaagagagaagagaagagttgcgacaaccaccagttaagcgtttgagacttcgtggtgattggtcagatactggacccagagcaaggccggagagtgaacgagaacgagatggagagcagagtcccaatgtgtcattgatgcagagaatgtctgatatgttatcaagatggtttgaagaagcaagtgaggttgcacaaagcaatagaggacgaggaagatctcgacccagaggtggaacaagtcaatcagatatttcaactcttcctacggtcccatcaagtcctgatttggaagtgagtgaaactgcaatggaagtagatactccagctgaacaatttcttcagccttctacatcctctacaatgtcagctcaggctcattcgacatcatctcccacagaaagccctcattctactcctttgctatcttctccagacagtgaacaaaggcagtctgttgaggcatctggacaccacacacatcatcagtctgattctccttcttctgtggttaacaaacagctcggatccatgtcacttgacgagcaacaggataacaataatgaaaagctgagccccaaaccagggacaggtgaaccagttttaagtttgcactacagcacagaaggaacaactacaagcacaataaaactgaactttacagatgaatggagcagtatagcatcaagttctagaggaattgggagccattgcaaatctgagggtcaggaggaatctttcgtcccacagagctcagtgcaaccaccagaaggagacagtgaaacaaaagctcctgaagaatcatcagaggatgtgacaaaatatcaggaaggagtatctgcagaaaacccagttgagaaccatatcaatataacacaatcagataagttcacagccaagccattggattccaactcaggagaaagaaatgacctcaatcttgatcgctcttgtggggttccagaagaatctgcttcatctgaaaaagccaaggaaccagaaacttcagatcagactagcactgagagtgctaccaatgaaaataacaccaatcctgagcctcagttccaaacagaagccactgggccttcagctcatgaagaaacatccaccagggactctgctcttcaggacacagatgacagtgatgatgacccagtcctgatcccaggtgcaaggtatcgagcaggacctggtgatagacgctctgctgttgcccgtattcaggagttcttcagacggagaaaagaaaggaaagaaatggaagaattggatactttgaacattagaaggccgctagtaaaaatggtttataaaggccatcgcaactccaggacaatgataaaagaagccaatttctggggtgctaactttgtaatgagtggttctgactgtggccacattttcatctgggatcggcacactgctgagcatttgatgcttctggaagctgataatcatgtggtaaactgcctgcagccacatccgtttgacccaattttagcctcatctggcatagattatgacataaagatctggtcaccattagaagagtcaaggatttttaaccgaaaacttgctgatgaagttataactcgaaacgaactcatgctggaagaaactagaaacaccattacagttccagcctctttcatgttgaggatgttggcttcacttaatcatatccgagctgaccggttggagggtgacagatcagaaggctctggtcaagagaatgaaaatgaggatgaggaataataaactctttttggcaagcacttaaatgttctgaaatttgtataagacatttattatatttttttctttacagagctttagtgcaattttaaggttatggtttttggagtttttccctttttttgggataacctaacattggtttggaatgattgtgtgcatgaatttgggagattgtataaaacaaaactagcagaatgtttttaaaactttttgccgtgtatgaggagtgctagaaaatgcaaagtgcaatattttccctaaccttcaaatgtgggagcttggatcaatgttgaagaataattttcatcatagtgaaaatgttggttcaaataaatttctacacttgccatttgcatgtttgttgctttctaattaaagaaactggttgttttaagataccctgaaaaaaaaaaaa

SEQ ID NO: 142 - DNA, 1768 bp, Homo sapiens; identical to SEQ ID NO: 117

SEQ ID NO: 143 - DNA, 1389 bp, Homo sapiens
atggacaaagattctcaggggctgctagattcatccctgatggcatcaggcactgccagccgctcagaggatgaggagtcactggcagggcagaagcgagcctcctcccaggccttgggcaccatccctaaacggagaagctcctccaggttcatcaagaggaagaagttcgatgatgagctggtggagagcagcctggcaaaatcttctacccgggcaaagggggccagtggggtggaaccagggcgctgttcggggagtgaaccctcctccagtgagaagaagaaggtatccaaagcccccagcactcctgtgccacccagcccagccccagcccctggactcaccaagcgtgtgaagaagagtaaacagccacttcaggtgaccaaggatctgggccgctggaagcctgcagatgacctcctgctcataaatgctgtgttgcagaccaacgacctgacctccgtccacctgggcgtgaaattcagctgccgcttcacccttcgggaggtccaggagcgttggtacgccctgctctacgatcctgtcatctccaagttggcctgtcaggccatgaggcagctgcacccagaggctattgcagccatccagagcaaggccctgtttagcaaggctgaggagcagctgctgagcaaagtgggatcgaccagccagcccaccttggagaccttccaggacctgctgcacagacaccctgatgccttctacctggcccgtaccgcgaaggccctgcaggcccactggcagctcatgaagcagtattacctgctggaggaccagacagtgcagccgctgcccaaaggggaccaagtgctgaacttctctgatgcagaggacctgattgatgacagtaagctcaaggacatgcgagatgaggtcctggaacatgagctgatggtggctgaccggcgccagaagcgagagattcggcagctggaacaggaactgcataagtggcaggtgctagtggacagcatcacaggcatgagctctccggacttcgacaaccagacactggcagtgctgcggggccgcatggtgcggtacctgatgcgctcgcgtgagatcaccctgggcagagcaaccaaggataaccagattgatgtggacctgtctctggagggtccggcctggaagatatcccggaaacaaggtgtcatcaagctgaagaacaacggtgatttcttcattgccaatgagggtcgacggcccatctacatcgatggacggccggtgctctgtggctccaaatggcgcctcagcaacaactctgtggtggagatcgccagcctgcgattcgtcttccttatcaaccaggacctcattgccctcatcagggctgaggctgccaagatcacaccacagtga

SEQ ID NO: 144 - DNA, 1685 bp, Homo sapiens; identical to SEQ ID NO: 122

SEQ ID NO: 145 - DNA, 2199 bp, Homo sapiens
atgcctgaggaaacccagacccaagaccaaccgatggaggaggaggaggttgagacgttcgcctttcaggcagaaattgcccagttgatgtcattgatcatcaatactttctactcgaacaaagagatctttctgagagagctcatttcaaattcatcagatgcattggacaaaatccggtatgaaagcttgacagatcccagtaaattagactctgggaaagagctgcatattaaccttataccgaacaaacaagatcgaactctcactattgtggatactggaattggaatgaccaaggctgacttgatcaataaccttggtactatcgccaagtctgggaccaaagcgttcatggaagctttgcaggctggtgcagatatctctatgattggccagttcggtgttggtttttattctgcttatttggttgctgagaaagtaactgtgatcaccaaacataacgatgatgagcagtacgcttgggagtcctcagcagggggatcattcacagtgaggacagacacaggtgaacctatgggtcgtggaacaaaagttatcctacacctgaaagaagaccaaactgagtacttggaggaacgaagaataaaggagattgtgaagaaacattctcagtttattggatatcccattactctttttgtggagaaggaacgtgataaagaagtaagcgatgatgaggctgaagaaaaggaagacaaagaagaagaaaaagaaaaagaagagaaagagtcggaagacaaacctgaaattgaagatgttggttctgatgaggaagaagaaaagaaggatggtgacaagaagaagaagaagaagattaaggaaaagtacatcgatcaagaagagctcaacaaaacaaagcccatctggaccagaaatcccgacgatattactaatgaggagtacggagaattctataagagcttgaccaatgactgggaagatcacttggcagtgaagcatttttcagttgaaggacagttggaattcagagcccttctatttgtcccacgacgtgctccttttgatctgtttgaaaacagaaagaaaaagaacaacatcaaattgtatgtacgcagagttttcatcatggataactgtgaggagctaatccctgaatatctgaacttcattagaggggtggtagactcggaggatctccctctaaacatatcccgtgagatgttgcaacaaagcaaaattttgaaagttatcaggaagaatttggtcaaaaaatgcttagaactctttactgaactggcggaagataaagagaactacaagaaattctatgagcagttctctaaaaacataaagcttggaatacacgaagactctcaaaatcggaagaagctttcagagctgttaaggtactacacatctgcctctggtgatgagatggtttctctcaaggactactgcaccagaatgaaggagaaccagaaacatatctattatatcacaggtgagaccaaggaccaggtagctaactcagcctttgtggaacgtcttcggaaacatggcttagaagtgatctatatgattgagcccattgatgagtactgtgtccaacagctgaaggaatttgaggggaagactttagtgtcagtcaccaaagaaggcctggaacttccagaggatgaagaagagaaaaagaagcaggaagagaaaaaaacaaagtttgagaacctctgcaaaatcatgaaagacatattggagaaaaaagttgaaaaggtggttgtgtcaaaccgattggtgacatctccatgctgtattgtcacaagcacatatggctggacagcaaacatggagagaatcatgaaagctcaagccctaagagacaactcaacaatgggttacatggcagcaaagaaacacctggagataaaccctgaccattccattattgagaccttaaggcaaaaggcagaggctgataagaacgacaagtctgtgaaggatctggtcatcttgctttatgaaactgcgctcctgtcttctggcttcagtctggaagatccccagacacatgctaacaggatctacaggatgatcaaacttggtctgggtattgatgaagatgaccctactgctgatgataccagtgctgctgtaactgaagaaatgccaccccttgaaggagatgacgacacatcacgcatggaagaagtagactaa

SEQ ID NO: 146 - DNA, 990 bp, Homo sapiens; identical to SEQ ID NO: 97

SEQ ID NO: 147 - DNA, 573 bp, Homo sapiens
atggctactcatcacacgctgtggatgggactggccctgctgggggtgctgggcgacctgcaggcagcaccggaggcccaggtctccgtgcagcccaacttccagcaggacaagttcctggggcgctggttcagcgcgggcctcgcctccaactcgagctggctccgggagaagaaggcggcgttgtccatgtgcaagtctgtggtggcccctgccacggatggtggcctcaacctgacctccaccttcctcaggaaaaaccagtgtgagacccgaaccatgctgctgcagcccgcggggtccctcggctcctacagctaccggagtccccactggggcagcacctactccgtgtcagtggtggagaccgactacgaccagtacgcgctgctgtacagccagggcagcaagggccctggcgaggacttccgcatggccaccctctacagccgaacccagacccccagggctgagttaaaggagaaattcaccgccttctgcaaggcccagggcttcacagaggataccattgtcttcctgccccaaaccgataagtgcatgacggaacaatag

SEQ ID NO: 148 - DNA, 2034 bp, Homo sapiens
atggacgaccccgactgcgactccacctgggaggaggacgaggaggatgcggaggacgcggaggacgaggactgcgaggacggcgaggccgccggcgcgagggacgcggacgcaggggacgaggacgaggagtcggaggagccgcgggcggcgcggcccagctcgttccagtccagaatgacagggtccagaaactggcgagccacgagggacatgtgtaggtatcggcacaactatccggatctggtggaacgagactgcaatggggacacgccaaacctgagtttctacagaaatgagatccgcttcctgcccaacggctgtttcattgaggacattcttcagaactggacggacaactatgacctccttgaggacaatcactcctacatccagtggctgtttcctctgcgagaaccaggagtgaactggcatgccaagcccctcacgctcagggaggtcgaggtgtttaaaagctcccaggagatccaggagcggcttgtccgggcctacgagctcatgctgggcttctacgggatccggctggaggaccgaggcacgggcacggtgggccgagcacagaactaccagaagcgcttccagaacctgaactggcgcagccacaacaacctccgcatcacacgcatcctcaagtcgctgggtgagctgggcctcgagcacttccaggcgccgctggtccgcttcttcctggaggagacgctggtgcggcgggagctgccgggggtgcggcagagtgccctggactacttcatgttcgccgtgcgctgccgacaccagcgccgccagctggtgcacttcgcctgggagcacttccggccccgctgcaagttcgtctgggggccccaagacaagctgcggaggttcaagcccagctctctgccccatccgctcgagggctccaggaaggtggaggaggaaggaagccccggggaccccgaccacgaggccagcacccagggtcggacctgtgggccagagcatagcaagggtgggggcagggtggacgaggggccccagccacggagcgtggagccccaggatgcgggacccctggagaggagccagggggatgaggcagggggccacggggaagataggccggagcccttaagccccaaagagagcaagaagaggaagctggagctgagccggcgggagcagccgcccacagagccaggccctcagagtgcctcagaggtggagaagatcgctctgaatttggaggggtgtgccctcagccagggcagcctcaggacggggacccaggaagtgggcggtcaggaccctggggaggcagtgcagccctgccgccaacccctgggagccagggtggccgacaaggtgaggaagcggaggaaggtggatgagggtgctggggacagtgctgcggtggccagtggtggtgcccagaccttggcccttgccgggtcccctgccccatcggggcaccccaaggctggacacagtgagaacggggttgaggaggacacagaaggtcgaacggggcccaaagaaggtacccctgggagcccatcggagaccccaggccccagcccagcaggacctgcaggggacgagccagccgagagcccatcggagaccccaggcccccgcccagcaggacctgcaggggacgagccagccgagagcccatcggagaccccaggcccccgcccggcaggacctgcaggggacgagccagccgagagcccatcggagaccccaggccccagcccggcaggacctacaagggatgagccagccgagagcccatcggagaccccaggcccccgcccggcaggacctgcaggggacgagccagccgagagcccatcggagaccccaggcccccgcccggcaggacctgcaggggacgagccagccgagagcccatcggagaccccaggccccagcccggcaggacctacaagggatgagccagccaaggcgggggaggcagcagagttgcaggacgcagaggtggagtcttctgccaagtctgggaagccttaa

SEQ ID NO: 149 - DNA, 1417 bp, Homo sapiens; identical to SEQ ID NO: 60

SEQ ID NO: 150 - DNA, 878 bp, Homo sapiens; identical to SEQ ID NO: 61

SEQ ID NO: 151 - DNA, 2251 bp, Homo sapiens
gcgcaacgtcatttccgcgtacgggggagggcgggcctggagtctgagccggcgccgctcagtgtgaggtggtttctgcgggtgaggctggcgcccgtaccatgagcgaggcggacgggctgcgacagcgccggcccctgcggccgcaggtcgtcacagacgatgatggccaggccccggaggctaaggacggcagctcctttagcggcagagttttccgagtgaccttcttgatgctggctgtttctctcaccgttcccctgcttggagccatgatgctgctggaatctcctatagatccacagcctctcagcttcaaagaacccccgctcttgcttggtgttctgcatccaaatacgaagctgcgacaggcagaaaggctgtttgaaaatcaacttgttggaccggagtccatagcacatattggggatgtgatgtttactgggacagcagatggccgggtcgtaaaacttgaaaatggtgaaatagagaccattgcccggtttggttcgggcccttgcaaaacccgagatgatgagcctgtgtgtgggagacccctgggtatccgtgcagggcccaatgggactctctttgtggccgatgcatacaagggactatttgaagtaaatccctggaaacgtgaagtgaaactgctgctgtcctccgagacacccattgaggggaagaacatgtcctttgtgaatgatcttacagtcactcaggatgggaggaagatttatttcaccgattctagcagcaaatggcaaagacgagactacctgcttctggtgatggagggcacagatgacgggcgcctgctggagtatgatactgtgaccagggaagtaaaagttttattggaccagctgcggttcccgaatggagtccagctgtctcctgcagaagactttgtcctggtggcagaaacaaccatggccaggatacgaagagtctacgtttctggcctgatgaagggcggggctgatctgtttgtggagaacatgcctggatttccagacaacatccggcccagcagctctggggggtactgggtgggcatgtcgaccatccgccctaaccctgggttttccatgctggatttcttatctgagagaccctggattaaaaggatgatttttaagctctttagtcaagagacggtgatgaagtttgtgccgcggtacagcctcgtcctagaactcagcgacagcggtgccttccggagaagcctgcatgatcccgatgggctggtggccacctacatcagcgaggtgcacgaacacgatgggcacctgtacctgggctctttcaggtcccccttcctctgcagactcagcctccaggctgtttagccctcccagatagctgcccctgccacgcaggccaggagtcttcacactcaggcaccaggcctggtccaggaggagctgtggacacagtcgtggttcaagtgtccacatgcacctgttagtccctgagaggtggtgggaatggctgcttcattcctcgaggatgcccgggccccacctgggcttgtctttctgtttagagggaagtgtaacatatctgccatgaggaacataaattcatgtaaagccattttctcttaaacaaaacaaaactttctaagtacagtcattctctaggatttgggaagctccttgcacttggaacagggctcaggtgggtggagcagtaaggcactacccagagagcttgctgctgcggccctgtcctgcggcctcaaagttcttctttactatatataacgtgcggtcatacctttcttcgttgtggtggggatggaagagcagagggagcatggcccaggggtgttgaggccagcggtgagagccgtgttagccaagacatggaactgtgttctcaagggttatgtggggcgtgggctctccatagtgtgtatgaaaagcttgttgactctagcggctcagagaggactttgctgggtttctttctgtgaatatctccgtgctgaccatgctggaattggatgattctgcaattcgggacctactgcaggggtccgtttagtaacgtcttgtctgtgatctttgttcttgacctctagaccccaagatgtgaacagtgcacgtgttaatgtcatctttgctcatgtgttataagccccaagttgctgtatattttcacaagtatgtctacacactggtcatgattttgataataaataacgataaatcgaaaaaaaaaaaaaaaaaaaaaaaaaaaaaaa

SEQ ID NO: 152 - DNA, 13671 bp, Homo sapiens
atgaaagtagacaggactaaactgaagaagacacctactgaggctcctgcagactgcagagccttaatagacaaactcaaagtttgtaatgatgagcaacttctcttggaactgcagcagatcaaaacatggaacattggaaagtgcgagttatatcactgggtggacctgttggaccgcttcgatggaatactggcagatgctggacagacagtggagaatatgtcatggatgctcgtatgtgataggccagaaagagagcaactgaaaatgcttctcttggctgtgttgaacttcacagccttgctcattgagtacagcttttcccggcatctgtacagttccatagagcatttgacaactttattggcttcctctgatatgcaagtggtgctggcagtcctcaatctcctatatgtatttagcaaaagatcaaactacatcactcgtctgggatctgacaagaggaccccgctgctaactcggctacaacatttggcagagagctggggtggaaaggagaatggctttggacttgcagaatgttgcagagacttgcatatgatgaaatatccacccagtgcaactacactacactttgaattctatgcagatcctggggccgaggtcaaaattgagaaaaggacaactagtaacacactacattatattcacatagagcaacttgacaagatttcagaaagcccttctgaaatcatggaatctcttaccaaaatgtacagcattcctaaggataagcagatgctgttatttacacacatacgactggcccatggcttttctaatcacaggaagcgattgcaggcagttcaggccagactgcatgcaatatctatattagtgtattccaatgccttgcaggaatcagcaaacagtatcttgtataatggcttgatagaggagttggtagatgtccttcagataacggataagcagcttatggagattaaagcagcttctttacgaacattaacatcaattgtccacttggagagaactcccaaactcagcagtattattgactgtactggaactgcctcctaccatggatttttgccagtgcttgtaaggaactgtatccaggccatgattgatccttccatggatccataccctcaccagtttgccactgctctcttctcttttttataccatctggccagctacgatgctggtggtgaagccttggtctcctgtggaatgatggaagccttattgaaggtcataaagtttcttggcgatgaacaggaccagataacatttgtcaccagagccgtcagagtggttgaccttatcaccaacctggatatggcagcttttcaatcccatagtggactttctatcttcatttatagacttgagcatgaagtagatttgtgccgaaaagaatgtccgtttgtgatcaagccaaagatccagagacccaatactacacaagaaggagaggaaatggaaactgatatggatggagtccagtgtattccacaacgagcagcacttctgaaatccatgttgaatttcctcaagaaggccatccaagaccctgctttctcagatggcatacgacatgtgatggatggttctctgcctacctccctgaaacacatcatcagcaatgcagaatactatggcccatcactcttcctcctagctactgaagtggtgactgtgtttgtatttcaagaaccatcactgctctcctcactccaggacaatggattgacagatgtcatgctgcatgcactgcttatcaaagatgttcctgctacccgtgaagtccttggctccctcccaaatgtattcagtgcactctgtttgaatgcccgaggtcttcagtcttttgttcagtgtcagccttttgaacgcctcttcaaagttcttctgtctccagattacctcccagccatgcggaggaggagaagttctgatccccttggggatactgcatccaacctggggagtgctgtcgatgagctcatgagacatcagcccacccttaaaacagatgcaacgactgccatcatcaagttacttgaagaaatctgtaatcttggaagggaccccaaatacatctgtcagaagccatcaatccagaaggcagatggcactgccactgctcctcccccaaggtctaatcatgccgcagaagaagcctctagtgaggatgaggaggaagaggaagtacaggccatgcagagctttaattctacccagcaaaatgaaactgagcctaatcagcaggttgttggtacagaggaacgtattcctattcccctcatggattacatccttaatgtgatgaaatttgtggaatctattctgagcaacaatacaacagatgaccactgccaggaatttgtgaatcagaaaggactgttgcctttggttaccattttgggtcttcccaatctgcccattgactttcccacatctgctgcctgtcaggctgttgcaggtgtctgcaaatccatattgacactgtcacatgaacccaaagtccttcaagagggtctccttcagttggactccatcctctcctccctggagcccttacaccgccccattgaatcccctgggggctcagtgttgttgcgagaactggcttgcgcaggcaatgttgctgatgctaccctctcagcccaggccacacctctgctgcatgcactcactgctgcccatgcctacatcatgatgtttgttcatacttgcagagttggacagagtgaaattcgttccatctccgtaaaccagtggggctctcaattgggtctgagtgttttgagcaagctgagccagttatactgttccctggtgtgggaaagcactgtcctcctctctctgtgtaccccaaacagcctaccatctgggtgtgaatttggccaggcagatatgcagaaactggttccaaaggatgagaaggcaggtacgacccagggcggaaaaagatcagatggggaacaggatggagcagctggaagtatggatgcttctacccagggcttattagaaggcattgggctagatggtgacacattggctcccatggagacagatgaacctactgcttcagactctaagggcaaatctaaaatcacaccagcaatggctgccagaattaagcaaatcaagcctttgttatcagcttcctccagattaggccgagcacttgctgagctatttggacttcttgttaaactttgtgtgggatctcctgtccgccagagaaggagccatcatgctgccagcaccactacagcaccgacacctgccgcgcgatcaacagcctcagctctcactaagctcttgactaaggggttatcttggcagcccccaccatatacacctactccccgattcaggctgacattcttcatctgttcagttggtttcacatccccaatgctgtttgatgagaggaagtatccctaccacctcatgctgcaaaaatttctctgctccggaggccacaatgctctttttgaaactttcaactgggctctgtccatgggaggtaaagttcctgtttctgagggattggaacactcagacttgcctgatggcacaggagaattcctagatgcctggcttatgctggtggagaagatggtgaatcccaccacggtgcttgaatctccacattcgctgcctgccaaattgcctggaggtgtccagaactttccccagttcagtgcactgcgcttccttgtggtaactcagaaagcagcctttacttgcatcaaaaacttatggaaccggaaacccctgaaggtatatggtggacgaatggctgaatcgatgctggccattctatgccacatcctccgaggagaacctgtgattcgagagagactaagcaaggagaaggaggggtctcgaggagaagaggatacagggcaagaggaaggtggctcccgccgggaacctcaagtcaaccagcaacaactgcaacagctcatggacatgggcttcacaagggaacatgcaatggaggcactgttgaacaccagcaccatggagcaggccacagagtaccttttaacccaccctcctccaatcatgggaggagttgttcgggatctcagcatgtctgaagaggaccagatgatgagagcaattgctatgtctctgggacaggatattccaatggatcaaagggcagagtcacctgaggaagttgcttgccggaaggaggaagaggaacggaaagctcgggaaaagcaggaggaggaagaggctaaatgtctagagaagttccaggatgctgacccgttggaacaagatgagctccacactttcacagatactatgttgccaggctgcttccaccttcttgatgagctgccagacacagtataccgtgtgtgtgacctgatcatgacagcaatcaaacgtaatggagcagattatcgtgacatgattctgaagcaagtagtcaatcaggtgtgggaagctgctgatgtattgatcaaagctgctcttcccctgacaacaagtgacacaaaaaccgtgtcagagtggataagtcagatggccacactgccccaggcctccaatttggctactagaatcttgcttttaacgctactttttgaggagttgaagctaccttgtgcttgggtggttgaatcaagtggcatccttaatgtcctaatcaaactcttggaagtggttcagccctgcctccaggcagccaaggagcagaaggaagtccagaccccaaagtggatcacaccagtgttgctcctgattgatttctatgaaaagacagccatctcctcaaaaaggagagcccagatgactaagtacctgcaatccaacagcaacaactggcgctggtttgatgatcgctctgggcgttggtgtagttacagtgcaagcaacaatagcactattgattctgcctggaaatctggagagacaagcgtgcgattcactgcaggccgaagaagatacacggtccaattcactacaatggtgcaggttaatgaggaaacagggaaccgacgccctgtgatgctgactctcctcagggtacctcggctgaataaaaattcaaaaaacagcaatggacaggaactagagaagacgctggaagaaagcaaagaaatggatatcaaacgtaaagaaaataaaggcaatgatacccctttggccctagagagtacaaacactgaaaaggagacaagcctggaggaaacaaaaatcggggagatcctgatccagggcttgacagaagatatggtgactgttttaatccgggcctgcgtgagcatgctgggagtccctgtggacccagatactttgcatgccacccttcgtctctgtctgaggctcacccgggaccacaaatatgccatgatgtttgcagaactgaagagtacccgcatgatcttgaatttgacccagagctcaggcttcaatgggtttactcccctggtcacccttctcttaagacacatcattgaggacccctgtacccttcgtcataccatggaaaaggttgttcgctcagcagctacaagtggagctggtagcactacctctggtgttgtgtctggcagcctcggctctcgggagatcaactacatccttcgtgtccttgggccagccgcatgccgcaatccagacatattcacagaagtggccaactgctgtatccgcatcgcccttcctgcccctcgaggctcaggaactgcttcagatgatgaatttgagaatcttagaattaaaggccctaatgctgtacagctggtgaagaccacccctttgaagccctcacctctgcctgtcatccctgatactatcaaggaagtgatctatgatatgctgaatgctctggctgcataccatgctccagaggaagcagataaatctgatcctaaacctggggttatgacccaagaggttggccagctcctgcaagacatgggtgatgatgtataccagcagtaccggtcacttacgcgtcagagcagtgactttgatacgcagtcaggtttttccattaatagtcaggtctttgctgcagatggtgcctccactgagacttccgcatctgggacctcccaaggagaggcttcaactccagaggagtctcgagatgggaagaaagataaagaaggggaccgggcctctgaggaaggcaaacagaaaggcaagggcagcaaacctttaatgcctacctccactatccttcgtcttctggcagagttggtgaggtcctatgttggtattgctaccctgattgccaactacagctacactgtgggccagtctgaactgatcaaagaggactgcagtgtgctagcttttgttctggaccacctgctcccacatacccagaatgcagaagacaaggacacccctgccttggcccgcctgttcctcgcaagcctggctgctgcagggagtggcacagatgcccaggtggccctagtgaatgaagtaaaagcagcccttggacgggcactggctatggctgagagtacagagaaacatgccaggcttcaggcagtgatgtgtatcatcagtactatcatggagtcctgcccctccacctccagcttctacagcagtgccacagcgaagacccagcacaatggcatgaacaacatcattcggcttttcctgaagaagggactggttaatgacctggccagagtacctcacagcttagacctgtccagtcccaacatggccaacacagtcaatgctgctctgaagcctttggaaacactttcccggattgtgaaccagcccagtagcctttttggcagcaagagtgcttctagcaagaacaagtctgagcaggatgcccaaggagcctctcaagattccagtagcaaccagcaggacccaggcgagcctggggaagcagaagtgcaggaggaggatcatgatgtcactcagacagaggtggcagatggggatatcatggatggggaggctgaaaccgactcagtggtgattgctgggcagcctgaggtgctcagttcacaagagatgcaggttgagaatgagctggaggacctgatagatgagttgcttgagagggatggcggatctgggaacagtacaattatagtgagcagaagtggagaggatgaatcacaagaggacgtgctgatggatgaagctccttccaacctcagccaagcttccaccttgcaggccaaccgagaagattccatgaatatcctggaccctgaggatgaggaggagcacactcaggaagaggacagcagtggcagtaacgaggatgaggatgatagtcaggatgaagaggaggaggaggaggaagatgaggaagatgatcaggaggatgatgaaggtgaagagggagatgaagacgatgacgacgatggctctgagatggaattggatgaggattatcctgatatgaacgcttctcccttggtccgatttgagcgctttgaccgggaggatgatctcatcattgagtttgacaacatgttctccagtgctacagacatccccccatccccaggaaatatccctaccacccatccactgatggtgcgccatgcagaccacagttctctgacactgggcagtggctcttcaacaactcgtctcacccagggcatcgggcgcagtcagaggaccctaaggcagctgacggccaatactggccacaccattcatgttcactaccctgggaatcgccagcccaaccctcctcttatactgcagaggttgcttggtccctcagctgctgctgacatccttcagctgagcagcagccttcccctacaaagccggggtcgggcccgcctcctggtaggcaacgatgacgtccacatcatcgcccgttctgatgatgagctgctggatgactttttccatgatcagagcacagctaccagccaagcaggaaccctgtccagcatccccacagccctgacccgctggacagaagaatgcaaagttctcgatgctgagagcatgcatgactgtgtttcagtggttaaagtgtccattgtcaatcacctggaattcctgagggatgaggagctggaagaaaggcgagagaagcgcaggaaacaactggctgaggaagaaacaaagataactgataaaggcaaagaagataaggagaacagggatcagagtgcacagtgtactgcatctaagtcaaatgactccactgaacagaatctctcagatgggacgcctatgcctgacagctacccaacaaccccatcttcaactgatgcagctacatctgagtccaaggagacccttggcactctgcaatcctcacaacagcaaccaacactcccaaccccaccagctttgggagaggttcctcaggagctgcagtctccagctggagaagggggcagctctacacagctattgatgcctgtagagccagaggaattgggtcccacaaggccaagtggggaagcagaaacaactcagatggagttatccccagctcccactataacctcactttccccagagagagctgaggattctgatgcactgacggctgtcagcagtcagctagaaggctctcctatggatacaagcagcctggcttcctgtaccttagaggaggctgtgggtgacacttcagcagctggcagttctgagcagcccagagcaggcagctccactcctggggatgccccaccagctgtggcggaagtgcaaggcaggagtgatgggtcaggggaatctgcccagccacctgaggacagctccccacctgcatcctctgagagctcttccaccagagattctgccgtggccatttctggagcagattcccgaggaatcctagaagagccgttgccttcaacaagcagtgaagaagaagatccccttgcgggtatcagtctccctgaaggtgtggacccctcttttctggctgccctgcctgatgacatccgtcgggaagttctacagaaccagctaggcattcgtccaccaacccggactgccccctccacaaatagctcagcgcctgcagtggtggggaatcctggtgtgactgaagtgagccctgagtttctggctgccctgcctccagccattcaggaggaagtactggcacagcagagagctgagcagcagcgacgagaactagcacagaatgccagctcagacacccctatggaccctgtgaccttcatccagactctgccctcagacctgcgccgtagtgtcctagaggatatggaggacagtgtgttagctgtgatgccacctgacattgcagctgaggctcaagccctgagacgagagcaagaagcccggcagcgacagctcatgcatgagcgtctgtttgggcacagtagcacctccgcactctctgctattctccgaagcccggctttcaccagtcgcttaagtggcaaccgtggggtccagtatactcgccttgctgtgcagagaggtggcaccttccagatggggggtagcagcagccataacaggccttctggcagtaatgtagatactctcctccgcctccgaggacggctccttctggaccacgaagccctttcttgtctcttggtcctactttttgtggatgagccaaagctcaatactagccgtctacaccgagtactgagaaatctctgctaccatgcccagacccgccactgggtcatccgcagtctgctctccatcttgcagcgcagcagtgagagtgagctatgcattgaaacacccaaactcactacaagtgaggaaaagggcaaaaagtcgagcaagagctgtgggtcaagtagccatgagaaccgtcccctggacctgctacacaagatggagtcaaagagctccaaccagctttcctggctctcagtatccatggatgcagccctaggctgcaggactaatatatttcagatccagcgttcaggggggcgtaaacataccgagaagcatgcaagcggtggctccaccgtccacatccatccccaagctgctcctgttgtctgcagacacgttttggatacactcattcaattggccaaggtatttcccagccacttcacacagcagcggaccaaagaaacaaactgtgagagtgatcgggaaaggggcaataaggcctgtagcccatgctcctcacagtcctccagcagtggcatttgcacagacttctgggacttattggtaaaactggacaacatgaatgtcagccggaaaggcaagaactccgtgaagtcagtgccagtgagcgctggcggtgagggggaaacctctccatacagcctcgaggcctctccactggggcagctcatgaacatgttgtcacacccagtcatccgccggagctctctcttaactgagaaactcctcagactcctttctctcatctcaattgctctcccagaaaacaaggtgtcagaagcacaggctaattctggcagcggtgcttcctccaccaccactgccacctcaaccacatctaccaccaccaccactgccgcctccaccacgcccacaccccctactgcacccacccctgtcacttctgctccagccctggttgctgccacggctatttccaccattgtcgtagctgcttcgaccacagtgactacccccacgactgctaccactactgtttcaatttctcccactactaagggcagcaaatctccagcgaaggtgagtgatgggggcagcagcagtacagactttaagatggtgtcctctggcctcactgaaaaccagctacagctctctgtagaggtgttgacatcccactcttgttctgaggaaggcttagaggatgcagccaacgtactactgcagctctcccggggggactctgggacccgggacactgttctcaagctgctactgaatggagcccgccatctgggttataccctttgtaaacaaataggtaccctgctggccgagctgcgggaatacaacctcgagcagcagcggcgagcccaatgtgaaaccctctctcctgatggcctgcctgaggagcagccacagaccaccaagctgaagggcaaaatgcagagcaggtttgacatggctgagaatgtggtaattgtggcatctcagaagcgacctttgggtggccgggagctccagctgccttctatgtccatgttgacatccaagacatctacccagaagttcttcttgagggtactacaggtcatcatccagctccgggacgacacgcgccgggctaacaagaaagccaagcagacaggcaggctaggttcctccggtttaggctcagctagcagcatccaggcagctgttcggcagctggaggctgaggctgatgccattatacaaatggtacgtgagggtcaaagggcgcggagacagcaacaagcagcaacgtcggagtctagccagtcagaggcgtctgtccggagggaggaatcacccatggatgtggaccagccatctcccagtgctcaagatactcaatccattgcctccgatggaaccccacagggggagaaggaaaaggaagaaagaccacctgagttacccctgctcagcgagcagctgagtttggacgagctgtgggacatgcttggggagtgtctaaaggaactagaggaatcccatgaccagcatgcggtgctagtgctacagcctgctgtcgaggccttctttctggtccatgccacagagcgggagagcaagcctcctgtccgagacacccgtgagagccagctggcacacatcaaggacgagcctcctccactctcccctgcccccttaaccccagccacgccttcctcccttgacccattcttctcccgggagccctcatctatgcacatctcctcaagcctgccccctgacacacagaagttccttcgctttgcagagactcaccgcactgtgttaaaccagatcctacggcagtccacgacccaccttgctgatgggccttttgctgtcctggtagactacattcgtgtcctcgactttgatgtcaagcgcaaatatttccgccaagagctggagcgtttagatgaggggctccggaaagaagacatggctgtgcatgtccgtcgtgaccatgtgtttgaagactcctatcgtgagctgcatcgcaaatcccccgaagaaatgaagaatcgattgtatatagtatttgaaggagaagaagggcaggatgctggcgggctcctgcgggagtggtatatgatcatctctcgagagatgtttaaccctatgtatgccttgttccgtacctcacctggtgatcgagtcacctacaccatcaatccatcttcccactgcaaccccaaccacctcagctacttcaagtttgtcggacgcattgtggccaaagctgtatatgacaaccgtcttctggagtgctactttactcgatccttttacaaacacatcttgggcaagtcagtcagatatacagatatggagagtgaagattaccacttctaccaaggtctggtttatctgctggaaaatgatgtctccacactaggctatgacctcaccttcagcactgaggtccaagagtttggagtttgtgaagttcgtgacctcaaacccaatggggccaacatcttggtaacagaggagaataagaaggagtatgtacacctggtatgccagatgagaatgacaggagccatccgcaagcagttggcggctttcttagaaggcttctatgagatcattccaaagcgcctcatttccatcttcactgagcaggagttagagctgcttatatcaggactgcccaccattgacatcgatgatctgaaatccaacactgaataccacaagtaccagtccaactctattcagatccagtggttctggagagcattgcgttctttcgatcaagctgaccgtgccaagttcctccagtttgtcacgggtacttccaaggtacccctgcaaggctttgctgccctcgaaggcatgaatggcattcagaagtttcagatccatcgagatgacaggtccacagatcgcctgccttcagctcacacatgttttaatcagctggatctgcctgcctatgagagctttgagaagctccgccacatgctactgttggctatccaggagtgctctgaaggctttgggctggcctaataaggccctgcccaactccgtggggttttttttaccattgttggacctggggaggggggagttaaaaaaagaaccagaaagaaattgtcaaaaaccaataaatgaaatccaccaactcaccgtgtgtgtcccagctgccccatcttccccagcgcatacctgttcctcttctcattctctccccgccgcctgtttcctcaccttctctcccctttccatgccgtccatgatccccaccccatgtgttttaaaaaggcagtagcctttgcagggacctgtctgtcccaactgtttgaacagtgtgctcctcagattctgtgttcagaaggatttgctgcattgagacttgaaacctttggataggggaaaaaattatatatatatatatttttttgttctgtttgcatttcttaatttgtgcttggaatgtgttgatgtgcacagctaatgattcaatgcgagacaagattggcgtctgtgttgtggaggtttcaaataaagagcactcttcataactcaaaaaaaaaaaaaaaaaaaaaaaaaaaa

SEQ ID NO: 153 - DNA, 997 bp, Homo sapiens; identical to SEQ ID NO: 90

SEQ ID NO: 154 - DNA, 3063 bp, Homo sapiens
atgatgagcttcggcggcgcggacgcgctgctgggcgccccgttcgcgccgctgcatggcggcggcagcctccactacgcgctagcccgaaagggtggcgcaggcgggacgcgctccgccgctggctcctccagcggcttccactcgtggacacggacgtccgtgagctccgtgtccgcctcgcccagccgcttccgtggcgcaggcgccgcctcaagcaccgactcgctggacacgctgagcaacgggccggagggctgcatggtggcggtggccacctcacgcagtgagaaggagcagctgcaggcgctgaacgaccgcttcgccgggtacatcgacaaggtgcggcagctggaggcgcacaaccgcagcctggagggcgaggctgcggcgctgcggcagcagcaggcgggccgctccgctatgggcgagctgtacgagcgcgaggtccgcgagatgcgcggcgcggtgctgcgcctgggcgcggcgcgcggtcagctacgcctggagcaggagcacctgctcgaggacatcgcgcacgtgcgccagcgcctagacgacgaggcccggcagcgagaggaggccgaggcggcggcccgcgcgctggcgcgcttcgcgcaggaggccgaggcggcgcgcgtggacctgcagaagaaggcgcaggcgctgcaggaggagtgcggctacctgcggcgccaccaccaggaagaggtgggcgagctgctcggccagatccagggctccggcgccgcgcaggcgcagatgcaggccgagacgcgcgacgccctgaagtgcgacgtgacgtcggcgctgcgcgagattcgcgcgcagcttgaaggccacgcggtgcagagcacgctgcagtccgaggagtggttccgagtgaggctggaccgactgtcggaggcagccaaggtgaacacagacgctatgcgctcagcgcaggaggagataactgagtaccggcgtcagctgcaggccaggaccacagagctggaggcactgaaaagcaccaaggactcactggagaggcagcgctctgagctggaggaccgtcatcaggccgacattgcctcctaccaggaagccattcagcagctggacgctgagctgaggaacaccaagtgggagatggccgcccagctgcgagaataccaggacctgctcaatgtcaagatggctctggatatagagatagccgcttacagaaaactcctggaaggtgaagagtgtcggattggctttggcccaattcctttctcgcttccagaaggactccccaaaattccctctgtgtccactcacataaaggtgaaaagcgaagagaagatcaaagtggtggagaagtctgagaaagaaactgtgattgtggaggaacagacagaggagacccaagtgactgaagaagtgactgaagaagaggagaaagaggccaaagaggaggagggcaaggaggaagaagggggtgaagaagaggaggcagaagggggagaagaagaaacaaagtctcccccagcagaagaggctgcatccccagagaaggaagccaagtcaccagtaaaggaagaggcaaagtcaccggctgaggccaagtccccagagaaggaggaagcaaaatccccagccgaagtcaagtcccctgagaaggccaagtctccagcaaaggaagaggcaaagtcaccgcctgaggccaagtccccagagaaggaggaagcaaaatctccagctgaggtcaagtcccccgagaaggccaagtccccagcaaaggaagaggcaaagtcaccggctgaggccaagtctccagagaaggccaagtccccagtgaaggaagaagcaaagtcaccggctgaggccaagtccccagtgaaggaagaagcaaaatctccagctgaggtcaagtccccggaaaaggccaagtctccaacgaaggaggaagcaaagtcccctgagaaggccaagtccccagagaaggaagaggccaagtcccctgagaaggccaagtccccagtgaaggcagaagcaaagtcccctgagaaggccaagtccccagtgaaggcagaagcaaagtcccctgagaaggccaagtccccagtgaaggaagaagcaaagtcccctgagaaggccaagtccccagtgaaggaagaagcaaagtcccctgagaaggccaagtccccagtgaaggaagaagcaaagacccccgagaaggccaagtccccagtgaaggaagaagctaagtccccagagaaggccaagtccccagagaaggccaagactcttgatgtgaagtctccagaagccaagactccagcgaaggaggaagcaaggtcccctgcagacaaattccctgaaaaggccaaaagccctgtcaaggaggaggtcaagtccccagagaaggcgaaatctcccctgaaggaggatgccaaggcccctgagaaggagatcccaaaaaaggaagaggtgaagtccccagtgaaggaggaggagaagccccaggaggtgaaagtcaaagagcccccaaagaaggcagaggaagagaaagcccctgccacaccaaaaacagaggagaagaaggacagcaagaaagaggaggcacccaagaaggaggctccaaagcccaaggtggaggagaagaaggaacctgctgtcgaaaagcccaaagaatccaaagttgaagccaagaaggaagaggctgaagataagaaaaaagtccccaccccagagaaggaggctcctgccaaggtggaggtgaaggaagacgctaaacccaaagaaaagacagaggtagccaagaaggaaccagatgatgccaaggccaaggaacccagcaaaccagcagagaagaaggaggcagcaccggagaaaaaagacaccaaggaggagaaggccaagaagcctgaggagaaacccaagacagaggccaaagccaaggaagatgacaagaccctctcaaaagagcctagcaagcctaaggcagaaaaggctgaaaaatcctccagcacagaccaaaaagacagcaagcctccagagaaggccacagaagacaaggccgccaaggggaagtaa

SEQ ID NO: 155 - DNA, 10244 bp, Homo sapiens
gcagccatgagcggcagcagcggcggagccgccgcccccgccgcgtcctccggccccgccgcggcggccagcgcggctggctcgggctgcgggggcggtgccggcgagggggcagaggaggcggccaaggacctggccgacatcgcggccttcttccgatccgggtttcgaaaaaacgatgaaatgaaagctatggatgttttaccaattttgaaggaaaaagttgcatacctttcaggtgggagagataaacgtggaggtcccattttaacgtttccggcccgcagcaatcatgacagaatacgacaggaggatctcaggagactcatttcctatctagcctgtattcccagcgaggaggtctgcaagcgtggcttcacggtgatcgtggacatgcgtgggtccaagtgggactccatcaagccccttctgaagatcctgcaggagtccttcccctgctgcatccatgtggccctgatcatcaagccagacaacttctggcagaaacagaggactaattttggcagttctaaatttgaatttgagacaaatatggtctctttagaaggccttaccaaagtagttgatccttctcagctaactcctgagtttgatggctgcctggaatacaaccacgaagaatggattgaaatcagagttgcttttgaagactacattagcaatgccacccacatgctgtctcggctggaggaacttcaggacatcctagctaagaaggagctgcctcaggatttagagggggctcggaatatgatcgaggaacattctcagctgaagaagaaggtgattaaggcccccatcgaggacctggatttggagggacagaagctgcttcagaggatacagagcagtgaaagctttcccaaaaagaactcaggctcaggcaatgcggacctgcagaacctcttgcccaaggtgtccaccatgctggaccggctgcactcgacacggcagcatctgcaccagatgtggcatgtgaggaagctgaagctggaccagtgcttccagctgaggctgtttgaacaggatgctgagaagatgtttgactggatcacacacaacaaaggcctgtttctaaacagctacacagagattgggaccagccaccctcatgccatggagcttcagacgcagcacaatcactttgccatgaactgtatgaacgtgtatgtaaatataaaccgcatcatgtcggtggccaatcgtctggtggagtctggccactatgcctcgcagcagatcaggcagatcgcgagtcagctggagcaggagtggaaggcgtttgcggcagccctggatgagcggagcaccttgctggacatgtcctccattttccaccagaaggccgaaaagtatatgagcaacgtggattcatggtgtaaagcttgcggtgaggtagaccttccctcagagctgcaggacctagaagatgccattcatcaccaccagggaatatatgaacatatcactcttgcttattctgaggtcagccaagatgggaagtcgctccttgacaagctccagcggcccttgactcccggcagctccgattccctgacagcctctgccaactactccaaggccgtgcaccatgtcctggatgtcatccacgaggtgctgcaccaccagcggcagctggagaacatctggcaacaccgcaaggtccggctgcatcagaggctgcagctgtgtgttttccagcaggacgttcagcaggtgctagactggatcgagaaccacggagaagcatttctgagcaaacatacaggtgtggggaaatctcttcatcgggccagagcattgcagaaacgtcatgaagattttgaagaagtggcacagaacacatacaccaatgcggataaattactggaagcagcagaacagctggctcagactggggaatgtgaccccgaagagatttatcaggctgcccatcagctggaagaccggattcaagatttcgttcggcgtgttgagcagcgaaagatcctactggacatgtcagtgtcctttcacacccatgtgaaagagctgtggacgtggctggaggagctgcagaaggagctgctggacgacgtgtatgccgagtcggtggaggccgtgcaggacctcatcaagcgctttggccagcagcagcagaccaccctgcaggtgactgtcaacgtgatcaaggaaggggaggacctcatccagcagctcagggactctgccatctccagtaacaagaccccccacaacagctccatcaaccacattgagacggtgctgcagcagctggacgaggcgcagtcgcagatggaggagctcttccaggagcgcaagatcaagctggagctcttcctgcagctgcgcatcttcgagagggacgccatcgacattatctcagacctcgagtcttggaatgatgagctttctcagcaaatgaatgacttcgacacagaagatctcacgattgcagagcagcgcctccagcaccatgcagacaaagccttgaccatgaacaacttgacttttgacgtcatccaccaagggcaagatcttctgcagtatgtcaatgaggtccaggcctctggtgtggagctgctgtgtgatagagatgtagacatggcaactcgggtccaggacctgctggagtttcttcatgaaaaacagcaggaattggatttagccgcagagcagcatcggaaacacctggagcagtgcgtgcagctgcgccacctgcaggcagaagtgaaacaggtgctgggttggatccgcaacggagagtccatgttaaatgccggacttatcacagccagctcgttacaagaggcagagcagctccagcgagagcacgagcagttccagcatgccattgagaaaacacatcagagcgcgctgcaggtgcagcagaaggcagaagccatgctacaggccaaccactacgacatggacatgatccgggactgcgccgagaaggtggcgtctcactggcaacagctcatgctcaagatggaagatcgcctcaagctcgtcaacgcctctgtcgctttctacaaaacctcagagcaggtctgcagcgtcctcgagagcctggaacaggagtacaagagagaagaagactggtgtggcggggcggataagctgggcccaaactctgagacggaccacgtgacgcccatgatcagcaagcacctggagcagaaggaggcattcctgaaggcttgcacccttgctcggaggaatgcagacgtcttcctgaaatacctgcacaggaacagcgtgaacatgccaggaatggtgacgcacatcaaagctcctgaacagcaagtgaaaaatatcttgaatgaactcttccaacgggagaacagggtattgcattactggaccatgaggaagagacggctggaccagtgtcagcagtacgtggtctttgagaggagtgccaagcaggctttggaatggatccatgacaatggcgagttctacctttccacacacacctccacgggctccagtatacagcacacccaggagctcctgaaagagcacgaggagttccagataactgcaaagcaaaccaaagagagagtgaagctattgatacagctggctgatggcttttgtgaaaaagggcatgcccatgcggcagagataaaaaaatgtgttactgctgtggataagaggtacagagatttctctctgcggatggagaagtacaggacctctttggaaaaagccctggggatttcttcagattccaacaaatcgagtaaaagtctccagctagatatcattccagccagtatccctggctcagaggtgaaacttcgagatgctgctcatgaacttaatgaagagaagcggaaatctgcccgcaggaaagagttcataatggctgagctcattcaaactgaaaaggcttatgtaagagacctccgggaatgtatggatacgtacctgtgggaaatgaccagtggcgtggaagagattccacctggcattgtaaacaaagaactcatcatcttcggaaacatgcaagaaatctacgaatttcataataacatattcctaaaggagctggaaaaatatgaacagttgccagaggatgttggacattgttttgttacttgggcagacaagtttcagatgtatgtcacatattgcaaaaataagcctgattctactcagctgatattggaacatgcagggtcctattttgacgagatacagcagcgacatggattagccaattccatttcttcctaccttattaaaccagttcagcgaataacgaagtatcagctccttttaaaagagctgctgacgtgctgtgaggaaggaaagggagagattaaagatggcctggaggtgatgctcagcgtgccgaagcgagccaatgatgccatgcacctcagcatgctggaagggtttgatgaaaacattgagtctcagggagaactcatcctacaggaatccttccaagtgtgggacccaaaaaccttaattcgaaagggtcgagaacggcatctcttcctttttgaaatgtccttagtatttagtaaagaagtgaaagattccagtgggagaagcaagtacctttataaaagcaaattgtttacctcagagttgggtgtcacagaacatgttgaaggagacccttgcaaatttgcactgtgggtggggagaacaccaacttcagataataaaattgtccttaaggcttccagcatagagaacaagcaggactggataaagcatatccgcgaagtcatccaggagcggacgatccacctgaagggagccctgaaggagcccattcacatccctaagaccgctcccgccacaagacagaagggaaggagggatggagaggatctggacagccaaggagacggcagcagccagcctgatacgatttccatcgcctcacggacgtctcagaacacgctggacagcgataagctctctggtggctgtgagctgacagtggtgatccatgacttcaccgcttgcaacagcaacgagctgaccatccgacggggccagaccgtggaagttctggagcggccgcatgacaagcctgactggtgtctggtgcggacaactgaccgctccccagcggcagaaggcctggtcccctgtggttcactgtgcatcgcccactccagaagtagcatggaaatggagggcatcttcaaccacaaagactcgctctccgtctccagcaatgacgccagtccacccgcatccgtggcttccctccagccccacatgatcggggcccagagctcgccgggccccaagcggccgggcaacaccctgcgcaagtggctcaccagccccgtgcggcggctcagcagcggcaaggccgacgggcacgtgaagaagctggcgcacaagcacaagaagagccgcgaggtccgcaagagcgccgacgccggctcgcagaaggactccgacgacagtgcggccaccccgcaggacgagacggtcgaggagagaggccggaacgagggcctgagcagcggtactctctccaaatcctcctcctcggggatgcagagctgtggagaagaggaaggcgaggagggggccgacgccgtgcccctgccgccacccatggccatccagcagcacagcctcctccagccagactcacaggatgacaaggcctcttctcggttattagtccgccccaccagctccgaaacaccgagtgcagccgagctcgtcagtgcaattgaggaactcgtgaaaagcaagatggcactggaggatcgccccagctcactccttgttgaccagggagatagtagcagcccttccttcaacccttcggataattcccttctctcttcctcctcgcccattgatgagatggaagaaaggaaatccagctctttaaagagaagacactacgttttgcaagaactagtggagacagagcgtgactatgtgcgggaccttggctatgtggttgagggctacatggcacttatgaaagaagatggtgttcctgatgacatgaaaggaaaagacaaaattgtgttcggcaacatccatcagatttacgactggcacagagacttttttttaggagagttagagaagtgccttgaagatccagaaaaactaggatccctttttgttaaacacgagagaaggttgcacatgtacatagcttattgtcaaaataaaccaaagtctgagcacattgtctcagaatacattgataccttttttgaggacttaaagcagcgtcttggccacaggttacagctcacagatctgttgatcaaaccagtgcagagaatcatgaagtatcagctgttactgaaggacttcctcaagtattccaaaaaggccagcctggatacatcagaattagagagagctgtggaagtcatgtgcatagtacccaggcggtgcaacgacatgatgaacgtggggcggctgcaaggattcgacgggaaaatcgttgcccagggtaaactgctcttgcaggacacattcttggtcacagaccaagatgcaggacttctgcctcgctgcagagagaggcgcatcttcctctttgagcagatcgtcatattcagcgaaccacttgataaaaagaagggcttctccatgccgggattcctgtttaagaacagtatcaaggtgagttgcctttgcctggaggaaaatgtggaaaatgatccctgtaaatttgctctgacatcgaggacgggtgacgtggtagagaccttcattttgcattcatctagtccaagtgtccggcaaacttggatccatgaaatcaaccaaattttagaaaaccagcgcaattttttaaatgccttgacatcgccaatcgagtaccagaggaaccacagcgggggcggcggcggcggcggcagcgggggcagcggcgggggtgggggcagcggcggcggcggggcccccagtggcggcagcggccacagtggcggccccagcagctgcggcggcgcccccagcacgagcaggagccggccctcccggatcccccagcctgtccgacaccacccccccgtgctggtctcctctgcagcctcgagccaggcagaggcagacaagatgtcaggtacgtccacccccgggccctccctgcctccccctggcgcggcccccgaggccggccccagcgcgcccagcaggcggccccccggcgcggacgccgaggggtccgagcgagaagcggagccgatccccaagatgaaggtgctggagagccccaggaaaggcgccgcgaacgcctcggggtcgagcccagacgcccccgccaaggacgcgcgcgctagcctgggcaccctgccgcttgggaagccccgggccggggccgcttcgccgctgaactcgccgctctccagcgcggtcccttctctcggcaaggagcccttcccccccagcagccccctgcagaaggggggctccttctggagctccatccccgcctcccccgccagccgacccggctccttcaccttcccgggggacagcgactccctccagcggcagacaccccgccacgcggcccctggcaaggatactgaccgcatgagcacgtgctcctcggccagcgagcagtccgtgcagtccacccagagcaacgggagtgaaagcagcagcagtagcaacatctccaccatgttggtgacacacgattacacggcagtgaaggaggatgagatcaacgtctaccaaggagaggtcgttcaaattctggccagcaaccagcagaacatgtttctggtgttccgagccgccactgaccagtgccccgcagctgagggctggattccaggctttgtcctgggccacaccagtgcagtcatcgtggagaacccggacgggactctcaagaagtcaacatcttggcacacagcactccgtttaaggaaaaaatctgagaaaaaagataaagacggcaaaagggaaggcaagttagagaacggttatcggaagtcacgggaaggactcagcaacaaggtatctgtgaagcttctcaatcccaactacatttatgacgttcccccagaattcgtcattccattgagtgaggtcacgtgtgagacaggggagaccgttgttcttagatgtcgagtctgtggccgccccaaagcctcaattacctggaagggccctgaacacaacaccttgaacaacgatggtcactacagcatctcctacagtgacctgggagaggccacgctgaagattgtgggcgtgaccacggaagatgacggcatctacacgtgcatcgctgtcaatgacatgggttcagcctcatcgtcggccagcctgagggtcctaggtccagggatggatgggatcatggtgacctggaaagacaactttgactccttctacagtgaagtggctgagcttggcaggggcagattctctgtcgttaagaaatgtgatcagaaaggaaccaagcgagcagtggccactaagtttgtgaacaagaagttgatgaagcgcgaccaggtcacccatgagcttggcatcctgcagagcctccagcaccccctgcttgtcggcctcctcgacacctttgagacccccaccagctacatcctggtcttagaaatggctgaccagggtcgcctcctggactgcgtggtgcgatggggaagcctcactgaagggaagatcagggcgcacctgggggaggttctggaagctgtccggtacctgcacaactgcaggatagcacacctggacctaaagcctgagaatatcctggtggatgagagtttagccaagccaaccatcaaactggctgactttggagatgctgttcagctcaacacgacctactacatccaccagttactggggaaccctgaattcgcagcccctgaaatcatcctcgggaaccctgtctccctgacctcggatacgtggagtgttggagtgctcacatacgtacttcttagtggcgtgtcccccttcctggatgacagtgtggaagagacctgcctgaacatttgccgcttagactttagcttcccagatgactactttaaaggagtgagccagaaggccaaggagttcgtgtgcttcctcctgcaggaggaccccgccaagcgtccctcggctgcgctggccctccaggagcagtggctgcaggccggcaacggcagaagcacgggcgtcctcgacacgtccagactgacttccttcattgagcggcgcaaacaccagaatgatgttcgacctatccgtagcattaaaaactttctgcagagcaggcttctgcctagagtttgacctatccagaagttctttctcattctctttcacctgccaatcagctgttaatctgaattttcaagagaaaacaagcaaacataactgatcagctgccggtatgttcatcgtgtgaaattgcattccaagtgagctgtgctcagcagtgcttggacacagagctgcaagctgcgctggggtggaggaccgtcacttacactctgcccaaggcagaggtcgcattgctgtatcacagtattttattcaggtttctgcaaaaaaataaaaagataacttttttaaacaaacatgaatagaattttgcaaatttaacgttttcaagatttattcaaggaaacaaaatgcctatgttcaaccactggtgttaatgaacaaagatactgtgcgtctctggggaagacgcacctaggtggcggccactcccatggccttgtctaggactcagagaccactcggctctgagcttccaggcgcctcgtctgtgtgcatctcacgcccgacgtggcttctgaaacgtgcattcaacctcaaacttttgcataaaatagaatgaatcgttttgctctgatgaaatgtaggccttacttgtatataagactgttcctgccttcggtctgtcattttcccacctgcctcccctacccaccccccacccaccacctggggcttcctctgggggtccgagggtcttcccatcacatgaagacatcaggttgggtcctgccccactgcccctccccctgttcctgccccaagccgtcaatcagattgtggagcagtacacagtcagatgaaaatactgtaaatgcactcattgggggttttttggttttacttcatatcatgtgcaatgttgtggctttaacattttatgcaactatttatgaagacctctgttgtacctgtaataaatatatagaaaaagcaaaaaaaaaaaaaaaaaa

SEQ ID NO: 156 - DNA, 7169 bp, Homo sapiens
gggaggagatccgctcacacacacgaggaggagggttgagctgccgccgccgccgcctctgtcgtcgtcgcgagtgtggagtcgggactggagctgctgccgcggcgacgccggggatctttgtcgctagctcccggcccttctgccccgccgccttccctcagtcagcgttgcccactcctctccggccgggcgcccctgcctccatttcccgctctctgtccaccacacacacggcccccccgatcatggatccgggcagtggcggcggcggcggcggcggcggcggcggcgggagcagcagcggcagcagcagcagcgactcggcgcctgactgctgggaccaggcggacatggaagcccccgggccgggcccttgcggcggcggcggctccctggcggcggcggccgaggcccagcgggagaacctcagcgcggccttcagccggcaactcaacgtcaacgccaagcccttcgtgcccaacgtccacgccgccgagttcgtgccgtccttcctgcggggcccggcagcgccgccacccccagctggcggcgccgccaataaccacggagccggcagcggcgcgggaggccgtgcggcacctgtggaatcctctcaagaggaacagtcattgtgtgaaggttcaaattcagctgttagcatggaactttcagaacctattgtagaaaatggagagacagaaatgtctccagaagaatcatgggagcacaaagaagaaataagtgaagcagagccagggggtggttccttgggagatggaaggccgccagaggaaagtgcccatgaaatgatggaggaggaagaggaaatcccaaaacctaagtctgtggttgcaccgccaggtgctcctaagaaagagcatgtaaatgtagtattcattgggcacgtagatgctggcaagtcaaccattggaggacaaataatgtatttgactggaatggttgacaaaaggacgcttgaaaagtatgaaagagaagctaaagagaaaaacagagaaacttggtacttgtcttgggccttagacacaaatcaggaagaacgagacaagggtaaaacagtagaagtgggtcgtgcctattttgaaaccgaaaagaagcatttcacaattctagatgcccctggccacaagagttttgtcccaaatatgattggtggtgcctctcaagctgatttggctgtgctggtaatctcagccaggaaaggagagtttgaaactggatttgaaaaaggaggacagacaagagaacatgcaatgttggcaaagacagcaggtgtaaaacacctaattgtgctaattaataagatggatgatccaacagtaaattggagcaatgagagatatgaagaatgtaaggagaaactagtgccatttttgaaaaaagttggcttcaatcccaaaaaggacattcactttatgccctgctcaggacttactggagcaaatctcaaagagcagtcggatttctgtccttggtacattggattaccgtttattccatatctggataatttgccgaacttcaatagatcagttgatggaccaatcaggctgccaattgtggataagtacaaggatatgggcactgtggtcctgggaaagctggaatcaggatctatttgtaaaggccagcagcttgtgatgatgccaaacaagcacaacgtggaagttcttggaatactttccgatgatgtagagactgataccgtagccccaggtgaaaacctcaaaatcagactgaaaggaattgaagaagaggagattcttccagggtttatactttgtgatcctaataatctttgtcattctggacgcacatttgatgcccagatagtgattatagagcacaaatccatcatctgcccaggctataatgcggtgctgcatattcatacctgtattgaggaggtggaaataacagccttaatctgcttggtagacaaaaaatcaggagaaaaaagtaagacccgaccccgttttgtcaaacaagatcaagtatgcattgctcgcttaaggacagcaggaaccatctgccttgagacctttaaagacttccctcagatgggtcgtttcaccttaagagatgagggtaagaccattgcaattggaaaagttctgaaactggttccagagaaagactaagcattttcttgatgaccctgcacaatactgtgaggaaaattgactgcagaagcctacttcacaccgccttctcttattttctgcccattgataaacctctccccatattttgcaaagaggaaattcacagcaaaagtccacattatgtcagctttctcatattgagagctctgctatgccactgttgaatttttcccaagattcctgtccctagccctcacttcaaactctgcttccttggacagatttggcaatagctttgtaagtgatgtggacataattgcctacaataatgaaaacctacaggaatttttttatttttcattttccccttaggcatatttagtatttttcccccaggcagatcattctgagtgtgcgagtgtgtgtgcacatgttacaaaggcaactaccatgttaataaaatattcaatttgaaatccttttcggtatttgaattgcttttgaataatgttttttatctggatgtaacattgttgcattagctttttaactttcccaagtaattgaatacattttattacttggacttttataaactctttccctacccactataaatgagacattcacagcgttcaagtttgtattaaaggaaaggattagtttgaccccttcttttgatggttaatgcatacatgcagttaaatccctttatgcaaatgtgacactgctttactaggtcttttagttatttatttattttttttttttttgccaatttatattgtaacatgatttcttgaacacagtaagttgttttaaaataaaagaacagcatactgtagtttttataagtaaagcgtaatgaaattgtacccctagagaaaattccattaacttgttaaattagtggaattaacaacaaataaagcatgtttgagacctggcaaaaattcctctggtagtatttataaatagagctgcatgcctctagtatgaaaaccgtatcagttgcaagtgccacttctacaagttactcagtttactctttgtatcagtaactttaaaggttggatgatccttgctggttaaagctaaatctcaacctagcaactaaatgaaaatatttagaatcatcagaatctgaacagactaaaattatcagcgataagcagaatcaagcagggtataagttttatctcaattatttgaaattgactgagttttcttaagtgtaaagctgaaatttgctaaccatgtttttgatgaaccacagtgcagcattgtgtgggttttagattgaatgactctctgctataattatcatgactttgaaatttttcatgagaataaatgaggaatggaggcaatttgtgggtttatccaaagcccccttgatgttgagtgttgccattgatcaaagatagcctcttttagattgtgatttctctctaaataagatactttgtatatttaatgacaagtctcttccctataattttgctcctcagaaaagaaaagcctagacagactgtatttccagtcacagaacataaaacttaatctaatgggtgttttgttttgttttgagacagaggctcactctgtcacctaggctggagtgcagtggctcgatctcagctcactgcagcctccacctcccggattcaagcaatttcctgcctcagcctcttgagtagctgggattacaggagccctccacgaggcccagttaatttttgtatctttagtggagacgaggtttccccctattggtcaggctggtctcaaacttctgacctcaagtgatccactcgcctcagcctctcaaaagtgctgggattacaggcatgaggcgccgcacttggcctagtgttttcttaactgtgaaattcccattcatttcttgaatgaggctacatcttatggacagagcaaagttattgtcctacagattcttaaaactataattatggctattgcatgaaatttaaatagattttattatgtctgcaaatctctgggcttttatttttctggaaaatataggagctttaatcaaaacataatagttctttttgtaattccatgttaataaaaacaaatactagcaattgcttgaattttaatgaatatttaaaagttcaagagccacggaaatcacttccagagataagagttccctttctaaatagaacacatttttaaaaaataagttatgtttgctactaaaacatttacactgttagactattatgtgcatgttgccaagactcttaagtaacttggatatcaactgtgaagggcctacctctaaaaagtaacaggtcatacaaatacaaatgtaactgtaaaaattccactggattcttgcatatttgcaagattagattattcaaaagaaatttcagtgctaaaattaaccagcaacataagttctatgggctttgaaaattgttctcatctttttaaagttgatgcattttcaatcctgcttacacaggctgttcatttggataagtaaataaaatgtctaaggtgaacttggcattatgtggagatgttggaccgttatagagcaatacaaattcctatgctgtcattctgttttctgcaaatgcaaacgtgcttatatggtcaacagtgcaaaaatagggtagttggctgcatatttagggtattacctaagcatttgttctctaacgttgctctactagaatgatttttttcttgcatcttttcacattaatgatgttctttatataactttcatgcgattatttagttttttaaattaataaagtgaatttaagaaatattgaaataaacatctaagtaattgccattttaaacccttgtttcttactgtgggagagggggaaatacagcactcatttcttgtttttaatttgcagaagtaagtgaaaatctatgtaaaatcaaaccaaaagagttggactgagtgtgtattgtcttgagattaagtgacaaatagtaaagtgttactgagtaattaagcccatgtattttttttttgtgagttgaaaatctttgaaatatgtgataaccgaatgtcaaaagttcctaaactctaacagtgcaggttgttcactgtaacgaggtaactcatatttgctggttacataaactacaagtactgctctcacaatatgggactttgaactgtgatgtagttcaacagttgccggcatcctctcagctgatacgctgcgaatattttgggttagacttgcagccagatgcagttttgcaacccaagaaaaaagttgaacctatgatcaaaaactgctcccaagatgaacctggaaaaaaatcagctaagctcccttggcgatctgcaggaacactagtaatgactggaattactccgtgatctttgatgactattacacataacagcactctagcaccttttcttactggcatggacttcctcatggactgctacttcatggatgatagcttcattgctttgggtagggatttaaggtagtcaaggggaaaatacgcagttttattacaggtcttaacatcaggcaactttcaactttaaaaccctttgtgaaaaatgtggttatagcactatagctctgattttaggatggttaaatgttatattcattgttggcttaccttatcaaactgtgccattaatcctttcacagacataggtaaggaagagaacaaccagtggattcaggggacaattatctatctccaaataataggcttttatttcttgcagctaactttttcagtgattctagcagatgccatctagtacatccttgatcttgtttctttcgtgagagatctcgccatggcagcatcttgttaagtaagtgtaattgcacatgcacaaaagacttaactagctttacatttagcagtcagttggttagattaggtttcatagtaaatgaataggaatagaaagaataggaagtgtttttattttccagtagtaattccgtggattccatttgacccagtttactatcagttcagttcaggtagatttggttcaacttttggtggtttttggctctaggatattcttgactttaatatcctagaacttactgagtcttcccttcaataaatacacttctcacatacctctaatcctatgcttccttgaaacaataatgctagctgagttgtttactaaggattattataagggcctgaaggtgtgggagtggagattaattaaaacctttatgttctccaatataagggaaaagcaggttggtactacttctgattaggcagaaaacaccaggattccttaagtgatccttgaaatggttattgttttctgccttgtcacatttgccactgtgccctttaaaacgatgtggaaacctcaggtttgtggacagcacaggtggaatgacatcttgtgcttcctgaggctcccctctaccaggcacattagcttagtgcttcagatgtcagcccaagtccttgttacctccttttcctgctgcccagggaagagtgtgtgtgctggagctggagcgcttgcactcttcaggtgactattctcacctccatttcctccacatgcattaggtgaaactgaggtctaagcctcctgcaaggtctacattttaaggactcacacatcaggctctcagaaatgtacacaggtattagttctgtttgttctaaaggaaatgtgggtatctctcaggccaggacttagtgactagttttcgctagacagcaggttaatacctagatctcatttaaaaaaaaaaaaaaaaaacaggattaaagggaactgatcaggtttgttgagttttttagcctaattccaaagcatggaagagtgctctaggtaggaaagaaagctttttcttacgatttgtagctacctactgtgcctgacttggtgcctgtgtgaggattaagcccttagtctgctcttgcaattattcaaatgacaaattaaatttgcttttgtaataacaataaaagttgtcatcttcccttttgaaaaaaaaaaaaaaaaaa

SEQ ID NO: 157 - DNA, 2252 bp, Homo sapiens; identical to SEQ ID NO: 91

SEQ ID NO: 158 - DNA, 1008 bp, Homo sapiens
atggcggcgggggcggctgaggcagctgtagcggccgtggaggaggtcggctcagccgggcagtttgaggagctgctgcgcctcaaagccaagtccctccttgtggtccatttctgggcaccatgggctccacagtgtgcacagatgaacgaagttatggcagagttagctaaagaactccctcaagtttcatttgtgaagttggaagctgaaggtgttcctgaagtatctgaaaaatatgaaattagctctgttcccacttttctgtttttcaagaattctcagaaaatcgaccgattagatggtgcacatgccccagagttgaccaaaaaagttcagcgacatgcatctagtggctccttcctacccagcgctaatgaacatcttaaagaagatctcaaccttcgcttgaagaaattgactcatgctgccccctgcatgctgtttatgaaaggaactcctcaagaaccacgctgtggtttcagcaagcagatggtggaaattcttcacaaacataatattcagtttagcagttttgatatcttctcagatgaagaggttcgacagggactcaaagcctattccagttggcctacctatcctcagctctatgtttctggagagctcataggaggacttgatataattaaggagctagaagcatctgaagaactagatacaatttgtcccaaagctcccaaattagaggaaaggctcaaagtgctgacaaataaagcttctgtgatgctctttatgaaaggaaacaaacaggaagcaaaatgtggattcagcaaacaaattctggaaatactaaatagtactggtgttgaatatgaaacattcgatatattggaggatgaagaagttcggcaaggattaaaagcttactcaaattggccaacataccctcagctgtatgtgaaaggggagctggtgggaggattggatattgtgaaggaactgaaagaaaatggtgaattgctgcctatactgagaggagaaaattaa

SEQ ID NO: 159 - DNA, 1008 bp, Homo sapiens
atggcggcggcggcggctcaggggggcgggggcggggagccccgtagaaccgagggggtcggcccgggggtcccgggggaggtggagatggtgaaggggcagccgttcgacgtgggcccgcgctacacgcagttgcagtacatcggcgagggcgcgtacggcatggtcagctcggcctatgaccacgtgcgcaagactcgcgtggccatcaagaagatcagccccttcgaacatcagacctactgccagcgcacgctccgggagatccagatcctgctgcgcttccgccatgagaatgtcatcggcatccgagacattctgcgggcgtccaccctggaagccatgagagatgtctacattgtgcaggacctgatggagactgacctgtacaagttgctgaaaagccagcagctgagcaatgaccatatctgctacttcctctaccagatcctgcggggcctcaagtacatccactccgccaacgtgctccaccgagatctaaagccctccaacctgctcatcaacaccacctgcgaccttaagatttgtgatttcggcctggcccggattgccgatcctgagcatgaccacaccggcttcctgacggagtatgtggctacgcgctggtaccgggccccagagatcatgctgaactccaagggctataccaagtccatcgacatctggtctgtgggctgcattctggctgagatgctctctaaccggcccatcttccctggcaagcactacctggatcagctcaaccacattctggcccttgacctgctggaccggatgttaacctttaaccccaataaacggatcacagtggaggaagcgctggctcacccctacctggagcagtactatgacccgacggatgagccagtggccgaggagcccttcaccttcgccatggagctggatgacctacctaaggagcggctgaaggagctcatcttccaggagacagcacgcttccagcccggagtgctggaggccccctag

SEQ ID NO: 160 - DNA, 5147 bp, Homo sapiens
gggaaaaaaaaaaaaaactgtccaccaagaattctatacctaaatatcttttaagtgaaggtgacataaagatgtttccaaacacacaacagctgaactagttcattaccagcagaccttcactgaaagaaatgttacagatgctttaggctgaaggaaaacaaaaccatgtggaagtctggatctatacagaaaattgaagagtactggaaatggtaactacatggattcaacacaactgcaatcaaaatcccagcaggctattttgtagaaatcgagaagctgatcctgaaattcatatagaaatgcaaaggacctggaataattaaaacaacttcaacaatgaaaagcagagtttggggactcgcagtgcctgattgcagacccggtgcatttggactcactgtggcgtggggtcccagatgggaggaagcttcctgagaggtgacgcctgagttgagtctaagaggacaaggagtgcggcaccttcccgtctgatgctggcgttgtgcgtatggtgccctgacgtctgtccacgtgggcgcggaagcaaacagcgatgtcccagacgcaggactacgagtgcaggagccataatgtcgacctgccggagtcgaggattccagggtcgaacactcggttggagtgggtggagatcatcgaaccgcgcacccgcgagcgcatgtacgccaacctggtcaccggtgagtgcgtgtgggacccgccggccggcgtccgcatcaagcgcaccagcgagaaccagtggtgggagctgttcgaccccaacacgtcccgcttctactactacaatgccagcacgcagcgcacggtgtggcaccggccgcagggctgcgacatcatcccgctggccaagctgcagacgctgaagcagaacacggagtccccgcgcgcctcggcggagagcagccccgggcgcggcagcagcgtcagccgtgagggcagcaccagctcctccctggagcccgagcccgacactgagaaagcgcaggagttgccagcgagggccgggcggcccgcggcgtttgggacagtgaaggaggacagcggcagctcttcaccaccaggagtgttccttgagaaggactatgagatttaccgggattacagtgcggacggccagcttcttcactacaggacctcctcgctgcggtggaactcgggcgccaaagagcgcatgctcatcaaggtcgctgatcgggagcccagcttcctcgccgcccagggcaatggctacgccccagacggcccacctggggtccgctcccgcagaccctccggcagccagcactcacccagcctgcagaccttcgccccggaggctgacggcaccatcttcttcccagagaggaggccgtcacccttcctgaagagggccgagctcccagggagcagctccccgctgctggcccagccccgaaagccctccggggactcgcagccctcctccccgcgctatggctatgaacccccgctctacgaggagcccccagtggagtaccaggcccccatctacgatgagccccccatggacgtgcaattcgaggctggcgggggctaccaggccggctctccccagcggtcgccgggccgtaagccccggccgttcctccagcccaacaagcagggccccccctcgccctgccagcagctggtgctcaccaagcagaagtgtcccgagcgcttcctgagcctggagtacagtcccgccggcaaggagtacgtgcggcagctggtctacgtggagcaggcgggctccagccccaagctgcgcgccggcccgcggcacaagtacgcgcccaaccccggcggtggttcgtactccttgcagcccagcccctgcctgctgagggaccagcgcctgggcgtcaagtccggagactacagcaccatggagggacctgagctgcggcacagccagccgcccacgccgctgccacaggcccaggaggatgccatgtcctggtccagccagcaggacaccctgtcctccacaggctactccccgggcacgcgcaagcggaagagcagaaagccctctttgtgccaagccaccagcgccacccccactgagggccccggggacctgcttgtggagcagcccctggccgaggaacagcccccgtgcgggaccagcctcgcccccgtgaagcgagcggaaggtgaggccgaaggggcgcggggcgcggccgagcccttcctggcgcaggctcggctggcctgggaggcgcagcaggcccacttccacatgaagcagaggagcagctgggactcccagcaggacggctctggctacgagagcgacggcgccctgccactgcccatgcccgggccggtggtgcgggccttcagcgaggacgaggcgctggcccagcaggagaacaggcactggaggaggggcaccttcgagaagctaggcttcccccagatcctgctggagaagagcgtctccgtgcagaccaacctggcctcaccagagccctacctccacccctcacagtctgaggacctcgctgcctgtgcccagttcgagagcagccggcagagccgcagcggcgttcccagctccagctgcgtcttccccactttcacgctgcgcaagccctcctcggagacggacatcgagaactgggcctccaagcacttcaacaagcacacgcagggcctcttccggcggaaggtgtccatcgccaacatgctggcctggagcagcgagtccatcaagaagcccatgatcgtgacaagcgaccggcacgtgaagaaggaggcctgcgagctcttcaagctgatccagatgtacatgggtgaccggcgggccaaggccgacccactgcacgtggccctggaggtggccaccaagggctggagcgtgcagggcctgcgggacgagctctacatccagctgtgccggcagaccaccgagaacttccgcctggagagcctggcccgcggctgggagctcatggccatctgcctggcctttttcccgcccacccccaagttccactcctacctggaaggctacatctaccggcacatggaccccgtcaatgacactaaagtgacacagcacataaaagagctcctggaaagaaacactaagaagaagtccaaattgagaaagaaacccaagccttatgttgaagagccggatggggtggcgataagcacgtatgccaagtactgttaccacaagctacagaaggcagccctgaccggggccaagaaggggctgaagaagcccaacgtggaggagatccggcatgccaagaacgccgtgttcagcccgtccatgttcggcagcgcactgcaggaggtcatgggcatgcagagagagcgctaccccgagcgccagctgccctgggtgcagacacggctctctgaggaggtgctggcgctcaacggtgaccagacagagggcatcttcagggtccctggggacattgacgaggtgaatgccctgaagctgcaggtggaccagtggaaggtgcccacaggcctggaagacccccacgtccctgcgtccctgctgaagctgtggtaccgggagctggaggagcccctgatcccgcacgagttctacgagcagtgcatcgcgcactacgacagccccgaggcggcggtggccgtggtgcacgcgctgccccgcatcaaccgcatggtgctgtgctacctcatccgcttcctgcaggtcttcgtgcagccggccaacgtcgcggtcaccaagatggatgtcagcaacctggccatggtgatggcgcccaactgcttgcgctgccagtccgacgacccgcgcgtcatcttcgagaacacccgcaaggagatgtccttcctgcgggtgctcatccagcacctggacaccagcttcatggagggtgtgctgtagcgggggcgcccggggacaggagggatgtcctgccgcccccagccaggccgaactccgcactcgctctcccggcagaggggccagaatcgcccggcccagccctggagccccctccactcccccaggcccctggccccggcgctccccacgtcttctgcctggtctgagggtgcagccagggcacagcagcggcggggagggcgcctctggccccccacctcacggccagttcccgcgggcaccgcctcgccctccgctggccgcgggtcagctccgagaaagtgccttctgtgtcctggagccgagcgacgctgcctccttggggccgggctgcctccctgtggctcctgcgcgccctggcctgggccttgcccagccgccccggtctctccttccctttctcctgtcctcgtcctggcctgcagctcttcccagccccgagagagcttcccgacctgtccccgcctcctctccctccctcggcccgtggtccccagctggtgactgctcaggagtttgggggctccaggacagtgggcccggggcctggcaggctctcggtgggtggggtgggggcccccaaaccaaagtcctctggggtagggagcagggctgggcaggcattctgggggcagggtgggggaggggcgagagtatttttttcttcgtgtaactgtaaatccagaatctatcctgcatcgcagcccaccgtgtatagagatataaatagagggaaagatataagaactaaatttgctaatgacatagttttaacctaaatgctatttatctctgagccgtccccgtcctccgtgcagagcaagttgaggtcattccttcttttcttctccgatcttttttcttggcttctgaccaaaaaccaagctctaccccatccccatcccagacctgcaggagacgagcgagcgggaaggcgccgggcccgggactgtccgttctcggggccagagctgctgggggaccgagtttgtacattttccattttggaattttgagttccaattgttgtaaaacttaatttctccccagtttttatatatatattttttagagttccgtttttatttattaaaaacaaaagccccagccctgccgaggcctgggcggcgtcctcagtcgggtggtcccggggcctttgcggtcccgcccggctgagacgctcgccccgacgcatggacccgagaggcgacgacacgagtgaataaagtgcacatggaccctg

SEQ ID NO: 161 - DNA, 600 bp, Homo sapiens
atggctttcacagagcattcaccgctgacccctcaccgtcgggacctctgtagccgctctatctggctagcaaggaagattcgttcagacctgactgctcttacggaatcctatgtgaagcatcagggcctgaacaagaacatcaacctggactctgcggatgggatgccagtggcaagcactgatcagtggagtgagctgaccgaggcagagcgactccaagagaaccttcaagcttatcgtaccttccatgttttgttggccaggctcttagaagaccagcaggtgcattttaccccaaccgaaggtgacttccatcaagctatacatacccttcttctccaagtcgctgcctttgcataccagatagaggagttaatgatactcctggaatacaagatcccccgcaatgaggctgatgggatgcctattaatgttggagatggtggtctctttgagaagaagctgtggggcctaaaggtgctgcaggagctttcacagtggacagtaaggtccatccatgaccttcgtttcatttcttctcatcagactgggatcccagcacgtgggagccattatattgctaacaacaagaaaatg

SEQ ID NO: 162 - DNA, 1401 bp, Homo sapiens
atgaccctcaaggcgagcgagggcgagagtgggggcagcatgcacacggcgctctccgacctctacctggagcatttgctgcagaagcgtagtcggccagaggctgtatcgcatccattgaatactgtgaccgaggacatgtacaccaacgggtctcctgccccaggtagccctgcccaggtcaagggacaggaggtgcggaaagtgcgactcatacagtttgagaaggtcacagaagagcccatgggaatcacgctgaagctgaatgaaaaacagtcctgtacggtggccagaattcttcatggtggcatgatccatagacaaggctcccttcacgtgggggatgagatcctagaaatcaatggcacaaatgtgacaaatcattcagtggatcagctgcagaaggcgatgaaagaaaccaaaggaatgatctcattaaaagtaattcccaaccagcaaagccgtcttcctgcactacagatgttcatgagagcgcagtttgactatgatcccaaaaaggacaatctgatcccttgcaaggaggcgggactgaagtttgctactggggacattatccagattatcaacaaggatgacagcaattggtggcagggacgggtggaaggctcctccaaggagtcagcaggattgatcccttcccctgagctgcaggaatggcgagtggcaagtatggctcagtcagctcctagcgaagccccgagctgcagtccctttgggaagaagaagaagtacaaagacaaatatctggccaagcacagctcgatttttgatcagttggatgttgtttcctacgaggaagtcgttcggctccctgcattcaagaggaagaccctggtgctgatcggagccagtggggtgggtcgcagccacattaagaatgccctgctcagccagaatccggagaagtttgtgtaccctgtcccatatacaacacggccgccaaggaagagtgaggaagatgggaaggagtaccactttatctcaacggaggagatgacgaggaacatctctgccaatgagttcttggagtttggcagctaccaaggcaacatgtttggcaccaaatttgaaacagtgcaccagatccataagcagaacaagattgccatccttgacattgagccccagaccctgaaaattgttcggacagcagaactttcgcctttcattgtgttcattgcacctactgaccagggcactcagacagaagccctgcagcagctgcagaaggactctgaggccatccgcagccagtacgctcactactttgacctctcactggtcaataatggtgttgatgaaacccttaagaaattacaagaagccttcgaccaagcgtgcagttctccacagtgggtgcctgtctcctgggtttactaa

SEQ ID NO: 163 - DNA, 3510 bp, Homo sapiens
atggccaggcagccaccgccgccctgggtccatgcagccttcctcctctgcctcctcagtcttggcggagccatcgaaattcctatggatctgacgcagccgccaaccatcaccaagcagtcagcgaaggatcacatcgtggacccccgtgataacatcctgattgagtgtgaagcaaaagggaaccctgcccccagcttccactggacacgaaacagcagattcttcaacatcgccaaggacccccgggtgtccatgaggaggaggtctgggaccctggtgattgacttccgcagtggcgggcggccggaggaatatgagggggaatatcagtgcttcgcccgcaacaaatttggcacggccctgtccaataggatccgcctgcaggtgtctaaatctcctctgtggcccaaggaaaacctagaccctgtcgtggtccaagagggcgctcctttgacgctccagtgcaaccccccgcctggacttccatccccggtcatcttctggatgagcagctccatggagcccatcacccaagacaaacgtgtctctcagggccataacggagacctatacttctccaacgtgatgctgcaggacatgcagaccgactacagttgtaacgcccgcttccacttcacccacaccatccagcagaagaaccctttcaccctcaaggtcctcaccaaccacccttataatgactcgtccttaagaaaccaccctgacatgtacagtgcccgaggagttgcagaaagaacaccaagcttcatgtatccccagggcaccgcgagcagccagatggtgcttcgtggcatggacctcctgctggaatgcatcgcctccggggtcccaacaccagacatcgcatggtacaagaaaggtggggacctcccatctgataaggccaagtttgagaactttaataaggccctgcgtatcacaaatgtctctgaggaagactccggggagtatttctgcctggcctccaacaagatgggcagcatccggcacacgatctcggtgagagtaaaggctgctccctactggctggacgaacccaagaaccttattctggctcctggcgaggatgggagactggtgtgtcgagccaatggaaaccccaaacccactgtccagtggatggtgaatggggaacctttgcaatcggcaccacctaacccaaaccgtgaggtggccggagacaccatcatcttccgggacacccagatcagcagcagggctgtgtaccagtgcaacacctccaacgagcatggctacctgctggccaacgcctttgtcagtgtgctggatgtgccgcctcggatgctgtcgccccggaaccagctcattcgagtgattctttacaaccggacgcggctggactgccctttctttgggtctcccatccccacactgcgatggtttaagaatgggcaaggaagcaacctggatggtggcaactaccatgtttatgagaacggcagtctggaaattaagatgatccgcaaagaggaccagggcatctacacctgtgtcgccaccaacatcctgggcaaagctgaaaaccaagtccgcctggaggtcaaagaccccaccaggatctaccggatgcccgaggaccaggtggccagaaggggcaccacggtgcagctggagtgtcgggtgaagcacgacccctccctgaaactcaccgtctcctggctgaaggatgacgagccgctctatattggaaacaggatgaagaaggaagacgactccctgaccatctttggggtggcagagcgggaccagggcagttacacgtgtgtcgccagcaccgagctagaccaagacctggccaaggcctacctcaccgtgctaggacggccagaccggccccgggacctggagctgaccgacctggccgagaggagcgtgcggctgacctggatccccggggatgctaacaacagccccatcacagactacgtcgtccagtttgaagaagaccagttccaacctggggtctggcatgaccattccaagtaccccggcagcgttaactcagccgtcctccggctgtccccgtatgtcaactaccagttccgtgtcattgccatcaacgaggttgggagcagccaccccagcctcccatccgagcgctaccgaaccagtggagcaccccccgagtccaatcctggtgacgtgaagggagaggggaccagaaagaacaacatggagatcacgtggacgcccatgaatgccacctcggcctttggccccaacctgcgctacattgtcaagtggaggcggagagagactcgagaggcctggaacaacgtcacagtgtggggctctcgctacgtggtggggcagaccccagtctacgtgccctatgagatccgagtccaggctgaaaatgacttcgggaagggccctgagccagagtccgtcatcggttactccggagaagattatcccagggctgcgcccactgaagttaaagtccgagtcatgaacagcacagccatcagccttcagtggaaccgcgtctactccgacacggtccagggccagctcagagagtaccgagcctactactggagggagagcagcttgctgaagaacctgtgggtgtctcagaagagacagcaagccagcttccctggtgaccgcctccgtggcgtggtgtcccgcctcttcccctacagtaactacaagctggagatggttgtggtcaatgggagaggtgatgggcctcgcagtgagaccaaggagttcaccaccccggaaggagtacccagtgcccctaggcgtttccgagtccggcagcccaacctggagacaatcaacctggaatgggatcatcctgagcatccaaatgggatcatgattggatacactctcaaatatgtggcctttaacgggaccaaagtaggaaagcagatagtggaaaacttctctcccaatcagaccaagttcacggtgcaaagaacggaccccgtgtcacgctaccgctttaccctcagcgccaggacgcaggtgggctctggggaagccgtcacagaggagtcaccagcacccccgaatgaagcttacaccaacaaccaagcggacatcgccacccagggctggttcattgggcttatgtgcgccatcgccctcctggtgctgatcctgctcatcgtctgtttcatcaagaggagtcgcggcggcaagtacccagtacgagaaaagaaggatgttccccttggccctgaagaccccaaggaagaggatggctcatttgactatagtgatgaggacaacaagcccctgcagggcagtcagacatctctggacggcaccatcaagcagcaggagagtgacgacagcctggtggactatggcgagggtggcgagggtcagttcaatgaagacggctccttcatcggccagtacacggtcaaaaaggacaaggaggaaacagagggcaacgaaagctcagaggccacgtcacctgtcaatgctatctactctctggcctaa

SEQ ID NO: 164 - DNA, 5069 bp, Homo sapiens
aaaaaagggtgaggagaagcagcggctgagcgggttggcatctggggcagcgggctcgctccaggccgtcgggggccgctcgccagcgtcgcccgctgtgttgggagcgcgggccgtgggcgtcgctcggccttgtccgcggcgtccccgctgccggccacggcgctcagcgcttgtgctctgtattgcaggtctaccccgagccccggagcgagagcgagtgcctgagcaacatccgcgagttcctgcgcggctgcggggcttccctgcggctggagacgtttgatgcaaatgatttgtatcaggggcagaattttaacaaggtcctcagttccttagtgactctaaataaagtaacagcagacatcgggctggggagtgactccgtgtgtgcccggccctcgtctcaccgcataaagtcttttgactcccttggatcacagtctttgcacactcggacttcaaaactgttccagggccagtatcggagtttggacatgaccgataatagcaacaatcaactggtagtaagagcaaagtttaacttccagcagaccaatgaggacgagctttccttctcaaaaggagacgtcatccatgtcacccgtgtggaagagggaggctggtgggagggcacactcaacggccggaccggctggttccccagcaactacgtgcgcgaggtcaaggccagcgagaagcctgtgtctcccaaatcaggaacactgaagagccctcccaaaggatttgatacgactgccataaacaaaagctattacaatgtggtgctacagaatattttagaaacagaaaatgaatattctaaagaacttcagactgtgctttcaacgtacctacggccattgcagaccagtgagaagttaagttcagcaaacatttcatatttaatgggaaatctagaagaaatatgttctttccagcaaatgctcgtacagtctttagaagaatgcaccaagttgcccgaagctcagcagagagtcggaggctgctttttaaacctgatgccacagatgaaaaccctgtacctcacgtattgtgccaatcacccttctgcagtgaatgtcctcacggaacacagtgaggagttgggggagttcatggagaccaaaggtgccagcagccctgggattctcgtgctgaccacgggcctgagcaaacccttcatgcgcctggataaataccctacgctgctcaaagagctcgagagacacatggaggattatcatacagatagacaagatattcaaaaatccatggctgccttcaaaaacctttcagcccaatgtcaagaagtccggaagaggaaagagcttgagctgcagatcctgacggaagccatccggaactgggagggcgatgacattaaaactctgggcaacgtcacttacatgtcccaggtcctgattcagtgtgccggaagtgaggaaaagaatgaaagatatcttctactcttcccaaatgttttgctaatgttgtctgccagtcctaggatgagtggctttatctatcagggaaagcttccaacgacaggaatgacaatcacaaagcttgaggacagtgaaaatcatagaaatgcatttgaaatatcagggagcatgattgagcggatattagtgtcgtgcaacaaccagcaggatctgcaggaatgggtggagcacctacagaagcaaacgaaggtcacgtctgtgggaaaccccaccataaagcctcattcagtgccatctcataccctcccctcccacccggtcactccgtccagcaagcacgcagacagcaagcccgcgccgctgacgcccgcctaccacacgctgccccacccctcccaccacggcaccccgcacaccaccatcaactggggacccctggagcctccgaaaacacccaagccctggagcctgagctgcctgcggcccgcgcctcccctccggccctcagctgctctctgctacaaggaggatcttagtaagagccctaagaccatgaaaaagctgctgcccaagcgcaaacctgaacggaagccttcagatgaggagttcgcgtcccggaaaagcacagctgctttggaagaagatgctcagattctgaaagtcattgaagcttactgcaccagcgccaaaacaaggcaaacactcaattcaagttcacgcaaagaatctgctccacaagttttgcttccagaagaagagaaaattatagtggaagaaactaaaagtaatggtcagacagtgatagaagaaaagagtcttgtggataccgtatatgcattaaaggatgaagttcaagaattaagacaggacaacaaaaagatgaagaaatctctagaggaagaacagagagcccgcaaagacctggagaagctggtgaggaaagtcctgaagaacatgaatgatcctgcctgggatgagaccaatctataagggatgtcctcagttctttctgttgaagaccagttctgaggtgaagctgggcacccctgacccaagtcggggtgcactcaggaccacagggcagggctgggtggggcgccaccttgctctctgtatatagaaaagctggagcttattctgcgaatggagacgatcaaaccatgactgatgaatccagacaggagggattgactctgaggacctgagctacatcaatccactctgtgaacatctcagttacctcattctgcaataagttcagtgactgactaaaagtcttgtttttccagactttgaattgaatatataaatattatatatacatgtttcttgtaaatatcccattttgaatgcatacctgtggtggttctgtccgggctaatccccatgctagaatgtcctttccagctacgtgaataagaagtcccatgcccgcatccaccggaagcagaagcctggtggatgcctggttcgttccgcagcaccagggcctccaccgtgctgtggcagcaccccccatgtcggtatttctaaataaccttatttatacctgcagagatacacttcagtcccattcagaagtcttctcttaaagcagcattacagtcccagacctgcgggtttctgagggcaacttgctggctgacagactcagtcttgacctcaaggaaggcccatacggcactgccgcatccacctagaggtgtttgctcttgtccgctgtctgagtactgtgattctcagatgagtttgctgcgttttgggaggacacagacggttctgtataggctagttcagtaacaacaaaatacactgttttgtcttccctcaaagagagatcttactagaacctgtaaatagaatgtattatttattataagtcactgcagctgatgaaaacagatggaggccatgctgcaggctgatactgatgggtggagttttgtcatcaggccagcctcatcccgaggtctcctccaccattggccgtagccagcaggcttcagtgctcaccgaaagtaaaatcccctccttcagcaagaataaagcaatatacaccttaggttccactaagtaacataggcataagcagggaacgtttcccccactgtgttccagtgcagaggagacgaagcctgtcctcaccgcggctcgctgggcccaggctggctctggaaagcctgtgcggtcctgggcaggaagcccggcccgtggagcaggttttcgttctgcttcagcaataaataagggtgaccacagggactttgcttttggtttcctttcctgtgaaaaggttggttttaaagtgagatacacttttccgtagaacaagtgttctatctttaaaaacccaaattgcagcaccgtggattactggtctcagaacaactcattgcgcatcagatttgactctctgattttctgtctattggccaaattgccctttaactgcacctgaatcctttgtgtactgatgcctttgagctgggcaccttgggagagtgttgtgttgctgtttacggttcttccttgcccttgctaattacagtctctggtgcccagcaagcccctttggcttccttccgtgactggtcacgttgtctgcctgggctcagcgtggacctgccccatgctgcagaacctggcctcacctggacttttcactagaattgccagcttcctcaacttagcagatcattcactcatgcgggcacaagcaaagatcaacactttcttttttggtaagcttgagttttacaagttattttttggtgatgcgtaagacattgcagtgggaaaccattcaacttgagtttattggagtttgctgttgtagcaggttttaactcaggaacaactcttgtctgatctctccgcccctctgccgggaggcgacattaactgtcctctcggagccggtagcgttgctgtccgagtccccaggacggatctcctgcagacctgccttaatgctcagatcgaagtatttcacaagaatacttgtgtttttaacagcccttcccctggacggtgcggccatgagggcctcatgttacggcattgccttttctttctgtggatccagtatcttcctcggctttttagggagcaggaaaaatgcgtctgagagcaactctttttaaaaacctgccctgttgtatataactgtgtctgtttcaccgtgtgacctcccaagggggtgggaacttgatataaacgtttaaaggggccacgatttgcccgagggttactcctttgctctcaccttgtatggatgaggagatgaagccatttcttatcctgtagatgtgaagcactttcagttttcagcgatgttggaatgtagcatcagaagctcgttccttcacactcagtggcgtctgtgcttgtccacatgcgctgggcgtctgggaccttgaatgcctgccctggttgtgtggactccttaatgccaatcatttcttcacttctctgggacacccagggcgcctgttgacaagtgtggagaaactcctaatttaaatgtcacagacaatgtcctagtgttgactactacaatgttgatgctacactgttgtaattattaaactgattatttttcttatgtcacaaaaaaaaaaa

SEQ ID NO: 165 - DNA, 1452 bp, Homo sapiens; identical to SEQ ID NO: 94

SEQ ID NO: 166 - DNA, 2602 bp, Homo sapiens
gagccgcggctaaggaacgcgggccgcccacccgctcccggtgcagcggcctccgcgccgggttttggcgcctcccgcgggcgcccccctcctcacggcgagcgctgccacgtcagacgaagggcgcagcgagcgtcctgatccttccgcccggacgctcaggacagcggcccgctgctcataagactcggccttagaaccccagtatcagcagaaggacattttaggacgggacttgggtgactctagggcactggttttctttccagagagcggaacaggcgaggaaaagtagtcccttctcggcgattctgcggagggatctccgtggggcggtgaacgccgatgattatataaggacgcgccgggtgtggcacagctagttccgtcgcagccgggatttgggtcgcagttcttgtttgtggatcgctgtgatcgtcacttgacaatgcagatcttcgtgaagactctgactggtaagaccatcaccctcgaggttgagcccagtgacaccatcgagaatgtcaaggcaaagatccaagataaggaaggcatccctcctgaccagcagaggctgatctttgctggaaaacagctggaagatgggcgcaccctgtctgactacaacatccagaaagagtccaccctgcacctggtgctccgtctcagaggtgggatgcaaatcttcgtgaagacactcactggcaagaccatcacccttgaggtcgagcccagtgacaccatcgagaacgtcaaagcaaagatccaggacaaggaaggcattcctcctgaccagcagaggttgatctttgccggaaagcagctggaagatgggcgcaccctgtctgactacaacatccagaaagagtctaccctgcacctggtgctccgtctcagaggtgggatgcagatcttcgtgaagaccctgactggtaagaccatcaccctcgaggtggagcccagtgacaccatcgagaatgtcaaggcaaagatccaagataaggaaggcattccttctgatcagcagaggttgatctttgccggaaaacagctggaagatggtcgtaccctgtctgactacaacatccagaaagagtccaccttgcacctggtactccgtctcagaggtgggatgcaaatcttcgtgaagacactcactggcaagaccatcacccttgaggtcgagcccagtgacactatcgagaacgtcaaagcaaagatccaagacaaggaaggcattcctcctgaccagcagaggttgatctttgccggaaagcagctggaagatgggcgcaccctgtctgactacaacatccagaaagagtctaccctgcacctggtgctccgtctcagaggtgggatgcagatcttcgtgaagaccctgactggtaagaccatcactctcgaagtggagccgagtgacaccattgagaatgtcaaggcaaagatccaagacaaggaaggcatccctcctgaccagcagaggttgatctttgccggaaaacagctggaagatggtcgtaccctgtctgactacaacatccagaaagagtccaccttgcacctggtgctccgtctcagaggtgggatgcagatcttcgtgaagaccctgactggtaagaccatcactctcgaggtggagccgagtgacaccattgagaatgtcaaggcaaagatccaagacaaggaaggcatccctcctgaccagcagaggttgatctttgctgggaaacagctggaagatggacgcaccctgtctgactacaacatccagaaagagtccaccctgcacctggtgctccgtcttagaggtgggatgcagatcttcgtgaagaccctgactggtaagaccatcactctcgaagtggagccgagtgacaccattgagaatgtcaaggcaaagatccaagacaaggaaggcatccctcctgaccagcagaggttgatctttgctgggaaacagctggaagatggacgcaccctgtctgactacaacatccagaaagagtccaccctgcacctggtgctccgtcttagaggtgggatgcagatcttcgtgaagaccctgactggtaagaccatcactctcgaagtggagccgagtgacaccattgagaatgtcaaggcaaagatccaagacaaggaaggcatccctcctgaccagcagaggttgatctttgctgggaaacagctggaagatggacgcaccctgtctgactacaacatccagaaagagtccaccctgcacctggtgctccgtctcagaggtgggatgcaaatcttcgtgaagaccctgactggtaagaccatcaccctcgaggtggagcccagtgacaccatcgagaatgtcaaggcaaagatccaagataaggaaggcatccctcctgatcagcagaggttgatctttgctgggaaacagctggaagatggacgcaccctgtctgactacaacatccagaaagagtccactctgcacttggtcctgcgcttgagggggggtgtctaagtttccccttttaaggtttcaacaaatttcattgcactttcctttcaataaagttgttgcattcccaaaaaaaaaaaaaaaaaaaaaaaaaaaaaa

SEQ ID NO: 167 - DNA, 663 bp, Homo sapiens
atggcatccgccacagactcgcgctatgggcagaaggagtcctcggatcagaacttcgactacatgttcaagattctcatcatcggcaacagcagcgtgggcaagacgtccttcctcttccgctatgctgacgactcgttcacgcctgccttcgtcagcaccgtgggcatcgacttcaaggtcaagaccatctatcgcaacgacaagaggatcaagctgcagatctgggacacagcagggcaagagcggtaccggaccatcaccaccgcatactaccggggcgctatgggcttcatcctcatgtatgacatcaccaacgaggaatccttcaatgcagtgcaggactggtccacccagatcaagacctactcatgggacaatgcccaggtgctgctggtaggaaacaagtgtgacatggaggatgagcgggtggtgtcatcagaacgtggccggcagctagctgaccaccttgggttcgagttctttgaggcaagcgccaaggacaacattaacgtcaagcagacctttgagcgcctggtggatgtcatctgcgagaagatgtccgagtcgttggacacggcggaccctgcggtcacaggcgccaagcagggcccacagctcagtgaccagcaggtgccaccgcaccaggactgcgcctgctga

SEQ ID NO: 168 - DNA, 552 bp, Homo sapiens
atggctgctcagcgagggatgcccagctccgccgtgagggtcctggaagaggcgttgggcatgggtttgacggcagccggggacgcgagggacacggcggacgcggtggcggctgagggcgcctactacctggaacaggtcaccataactgaagcatctgaagatgactatgaatatgaagagataccagatgacaattttagcatcccagaaggtgaagaagatctggcaaaagcaattcagatggcccaagaacaggctacagatactgaaattttggaacggaaaacagttcttccttcaaagcatgcagtacctgaagtaatagaagactttctctgcaatttcttgatcaaaatgggaatgaccagaactcttgattgctttcagtctgaatggtatgagttaatacagaaaggagtgactgaacttagaactgttgggaatgttccagatgtctacacccagattatgcttttggaaaatgagaacaaaaatttaaagaaagatttgaagcactacaaacaagcagctgagtatgttattttttaa

SEQ ID NO: 169 - DNA, 4457 bp, Homo sapiens; identical to SEQ ID NO: 124

SEQ ID NO: 170 - DNA, 1572 bp, Homo sapiens
atgccctcagtgatggagaagccgagcgcgggctctgggatcctgtcccgtagccgggccaagacggtgcccaacggcggacagccccactcggaggatgacagcagcgaggaggagcactcgcacgacagcatgatccgcgttggaaccaattaccaggccgtaattccggagtgcaagcctgagagccccgcacgctacagcaacaaggagctgaaggggatgctggtgtggtcacccaaccactgtgtgtcagatgccaagcttgacaagtacattgcgatggccaaggagaagcatggctacaacattgagcaggcgctgggcatgcttctgtggcataagcacgatgtggagaagtcgctggccgacctggccaacttcaccccattccctgacgagtggacagtagaggacaaggtgctgtttgaacaggcctttggcttccatggcaaatgcttccagcggatccagcagatgctgcctgacaagttgattcccagcctggtgaaatactactactcttggaagaagacccgcagccgaactagtgtgatggacagacaggcccggcggctggggggccgcaaggacaaagaagacagtgatgagctcgaagagggtcgaggaggcgtgagtgagggagagcccgatcctgcagatcccaagagagagcctctaccctctcggcccctgaatgcacgcccaggccctgggaaaaaggaggtccaggtgtctcagtaccgccaccatcccttgcgaacccggcgtcgcccacccaagggcatgtacctgagccctgaaggcctcacggcagtgtcaggaagcccggaccttgccaacctcacgctccgaggtcttgactctcagctcatctccctcaagcgccaggtacagagcatgaagcagacgaacagcagcctgcgccaagccctggagggcggtattgatccactacgccccccggaggccaacaccaagttcaactcccgctggaccacagatgagcagcttttggctgttcaagccatccgtaggtatggcaaagactttggggctattgcagaggtgattgggaacaagactctgacccaggtgaagactttctttgtgagctaccggcgccgcttcaatctggaggaggtgctgcaggaatgggaggctgagcaggatggggcccctggagccccagtccccatggaggaggctaggagaggggctccattgccagccccagccctagaggaagatgatgaggtccagattacatcggtctccacgtccgtgccccgatcagtgccccctgcgccaccaccccctccacctcccacctcgctgtcccagccacccccgctgctgaggccacctttgcccacggctcccactctgctccgacagccacccccactgcagcagggccgcttcctccagccccggctggcccccaaccagcccccaccgcctctcatccgccccgctctggctgccccccgccacagcgcccgccctggccctcagcccccacccaccctgattggaacccctctggagcccccagcaccctcactctga

SEQ ID NO: 171 - DNA, 1179 bp, Homo sapiens; identical to SEQ ID NO: 80
  misc_feature (866)..(866): n is a, c, g, or t
  misc_feature (929)..(929): n is a, c, g, or t
  misc_feature (938)..(938): n is a, c, g, or t
  misc_feature (941)..(941): n is a, c, g, or t
  misc_feature (954)..(954): n is a, c, g, or t
  misc_feature (965)..(965): n is a, c, g, or t
  misc_feature (969)..(969): n is a, c, g, or t
  misc_feature (992)..(992): n is a, c, g, or t
  misc_feature (1016)..(1016): n is a, c, g, or t
  misc_feature (1018)..(1018): n is a, c, g, or t
  misc_feature (1021)..(1021): n is a, c, g, or t
  misc_feature (1024)..(1024): n is a, c, g, or t
  misc_feature (1057)..(1057): n is a, c, g, or t
  misc_feature (1066)..(1066): n is a, c, g, or t
  misc_feature (1078)..(1078): n is a, c, g, or t
  misc_feature (1093)..(1093): n is a, c, g, or t
  misc_feature (1107)..(1107): n is a, c, g, or t
  misc_feature (1119)..(1120): n is a, c, g, or t
  misc_feature (1135)..(1135): n is a, c, g, or t
  misc_feature (1137)..(1138): n is a, c, g, or t

SEQ ID NO: 172 - DNA, 890 bp, Homo sapiens; identical to SEQ ID NO: 81
  misc_feature (650)..(651): n is a, c, g, or t
  misc_feature (659)..(659): n is a, c, g, or t
  misc_feature (689)..(690): n is a, c, g, or t
  misc_feature (734)..(734): n is a, c, g, or t
  misc_feature (740)..(740): n is a, c, g, or t
  misc_feature (745)..(745): n is a, c, g, or t
  misc_feature (754)..(755): n is a, c, g, or t
  misc_feature (766)..(766): n is a, c, g, or t
  misc_feature (780)..(780): n is a, c, g, or t
  misc_feature (797)..(797): n is a, c, g, or t
  misc_feature (819)..(820): n is a, c, g, or t

SEQ ID NO: 173 - DNA, 944 bp, Homo sapiens; identical to SEQ ID NO: 37

SEQ ID NO: 174 - DNA, 1002 bp, Homo sapiens; identical to SEQ ID NO: 83

SEQ ID NO: 175 - protein, 1075 aa, Homo sapiens
MTTANCGAHDELDFKLVFGEDGAPAPPPPGSRPADLEPDDCASIYIFNVDPPPSTLTTPLCLPHHGLPSHSSVLSPSFQLQSHKNYEGTCEIPESKYSPLGGPKPFECPSIQITSISPNCHQELDAHEDDLQINDPEREFLERPSRDHLYLPLEPSYRESSLSPSPASSISSRSWFSDASSCESLSHIYDDVDSELNEAAARFTLGSPLTSPGGSPGGCPGEETWHQQYGLGHSLSPRQSPCHSPRSSVTDENWLSPRPASGPSSRPTSPCGKRRHSSAEVCYAGSLSPHHSPVPSPGHSPRGSVTEDTWLNASVHGGSGLGPAVFPFQYCVETDIPLKTRKTSEDQAAILPGKLELCSDDQGSLSPARETSIDDGLGSQYPLKKDSCGDQFLSVPSPFTWSKPKPGHTPIFRTSSLPPLDWPLPAHFGQCELKIEVQPKTHHRAHYETEGSRGAVKASTGGHPVVKLLGYNEKPINLQMFIGTADDRYLRPHAFYQVHRITGKTVATASQEIIIASTKVLEIPLLPENNMSASIDCAGILKLRNSDIELRKGETDIGRKNTRVRLVFRVHIPQPSGKVLSLQIASIPVECSQRSAQELPHIEKYSINSCSVNGGHEMVVTGSNFLPESKIIFLEKGQDGRPQWEVEGKIIREKCQGAHIVLEVPPYHNPAVTAAVQVHFYLCNGKRKKSQSQRFTYTPVLMKQEHREEIDLSSVPSLPVPHPAQTQRPSSDSGCSHDSVLSGQRSLICSIPQTYASMVTSSHLPQLQCRDESVSKEQHMIPSPIVHQPFQVTPTPPVGSSYQPMQTNVVYNGPTCLPINAASSQEFDSVLFQQDATLSGLVNLGCQPLSSIPFHSSNSGSTGHLLAHTPHSVHTLPHLQSMGYHCSNTGQRSLSSPVADQITGQPSSQLQPITYGPSHSGSATTASPAASHPLASSPLSGPPSPQLQPMPYQSPSSGTASSPSPATRMHSGQHSTQAQSTGQGGLSAPSSLICHSLCDPASFPPDGATVSIKPEPEDREPNFATIGLQDITLDDVNEIIGRDMSQISVSQGAGVSRQAPLPSPESLDLGRSDGL

SEQ ID NO: 176 - protein, 320 aa, Homo sapiens
MEVEAVCGGAGEVEAQDSDPAPAFSKAPGSAGHYELPWVEKYRPVKLNEIVGNEDTVSRLEVFAREGNVPNIIIAGPPGTGKTTSILCLARALLGPALKDAMLELNASNDSMTDGAQQALRRTMEIYSKTTRFALACNASDKIIEPIQSRCAVLRYTKLTDAQILTRLMNVIEKERVPYTDDGLEAIIFTAQGDMRQALNNLQSTFSGFGFINSENVFKVCDEPHPLLVKEMIQHCVNANIDEAYKILAHLWHLGYSPEDIIGNIFRVCKTFQMAEYLKLEFIKEIGYTHMKIAEGVNSLLQMAGLLARLCQKTMAPVAS

SEQ ID NO: 177 - protein, 191 aa, Homo sapiens
MRGSHHHHHHGSYLGDTIESSTHASADAWGSRSGGGDASGSSPGPAVAASAARPAGAPGASPRPLAASGALREALRSPARRSDSGPARPRPRTKDSRRRDSGAVPRDRPGDPRPRRVPSTPPLPGRPEREPERAPSYDSGDAAAGERACCLPRCATAAGAWGGPCLAPLSGRPSPPPRAPRARACGLRGRI

SEQ ID NO: 178 - protein, 467 aa, Homo sapiens
MWRCPLGLLLLLPLAGHLALGAQQGRGRRELAPGLHLRGIRDAGGRYCQEQDLCCRGRADDCALPYLGAICYCDLFCNRTVSDCCPDFWDFCLGVPPPFPPIQGCMHGGRIYPVLGTYWDNCNRCTCQENRQWQCDQEPCLVDPDMIKAINQGNYGWQAGNHSAFWGMTLDEGIRYRLGTIRPSSSVMNMHEIYTVLNPGEVLPTAFEASEKWPNLIHEPLDQGNCAGSWAFSTAAVASDRVSIHSLGHMTPVLSPQNLLSCDTHQQQGCRGGRLDGAWWFLRRRGVVSDHCYPFSGRERDEAGPAPPCMMHSRAMGRGKRQATAHCPNSYVNNNDIYQVTPVYRLGSNDKEIMKELMENGPVQALMEVHEDFFLYKGGIYSHTPVSLGRPERYRRHGTHSVKITGWGEETLPDGRTLKYWTAANSWGPAWGERGHFRIVRGVNECDIESFVLGVWGRVGMEDMGHH

SEQ ID NO: 179 - protein, 244 aa, Homo sapiens
MAAPSDGFKPRERSGGEQAQDWDALPPKRPRLGAGNKIGGRRLIVVLEGASLETVKVGKTYELLNCDKHKSILLKNGRDPGEARPDITHQSLLMLMDSPLNRAGLLQVYIHTQKNVLIEVNPQTRIPRTFDRFCGLMVQLLHKLSVRAADGPQKLLKVIKNPVSDHFPVGCMKVGTSFSIPVVSDVRELVPSSDPIVFVVGAFAHGKVSVEYTEKMVSISNYPLSAALTCAKLTTAFEEVWGVI

SEQ ID NO: 180 - protein, 288 aa, Homo sapiens
MSDSGEQNYGERESRSASRSGSAHGSGKSARHTPARSRSKEDSRRSRSKSRSRSESRSRSRRSSRRHYTRSRSRSRSHRRSRSRSYSRDYRRRHSHSHSPMSTRRRHVGNRANPDPNCCLGVFGLSLYTTERDLREVFSKYGPIADVSIVYDQQSRRSRGFAFVYFENVDDAKEAKERANGMELDGRRIRVDFSITKRPHTPTPGIYMGRPTYGSSRRRDYYDRGYDRGYDDRDYYSRSYRGGGGGGGGWRAAQDRDQIYRRRSPSPYYSRGGYRSRSRSRSYSPRRY

SEQ ID NO: 181 - protein, 483 aa, Homo sapiens
MKEEKEHRPKEKRVTLLTPAGATGSGGGTSGDSSKGEDKQDRNKEKKEALSKVVIRRLPPTLTKEQLQEHLQPMPEHDYFEFFSNDTSLYPHMYARAYINFKNQEDIILFRDRFDGYVFLDNKGQEYPAIVEFAPFQKAAKKKTKKRDTKVGTIDDDPEYRKFLESYATDNEKMTSTPETLLEEIEAKNRELIAKKTTPLLSFLKNKQRMREEKREERRRREIERKRQREEERRKWKEEEKRKRKDIEKLKKIDRIPERDKLKDEPKIKVHRFLLQAVNQKNLLKKPEKGDEKELDKREKAKKLDKENLSDERASGQSCTLPKRSDSELKDEKPKRPEDESGRDYREREREYERDQERILRERERLKRQEEERRRQKERYEKEKTFKRKEEEMKKEKDTLRDKGKKAESTESIGSSEKTEKKEEVVKRDRIRNKDRPAMQLYQPGARSRNRLCPPDDSTKSGDSAAERKQESGISHRKEGGEE

SEQ ID NO: 182 - protein, 157 aa, Homo sapiens [sequence omitted]

SEQ ID NO: 183 - protein, 361 aa, Homo sapiens
MASLLAKDAYLQSLAKKICSHSAPEQQARTRAGKTQGSETAGPPKKKRKKTQKKFRKREEKAAEHKAKSLGEKSPAASGARRPEAAKEEAAWASSSAGNPADGLATEPESVFALDVLRQRLHEKIQEARGQGSAKELSPAALEKRRRRKQERDRKKRKRKELRAKEKARKAEEATEAQEVVEATPEGACTEPREPPGLIFNKVEVSEDEPASKAQRRKEKRQRVKGNLTPLTGRNYRQLLERLQARQSRLDELRGQDEGKAQELEAKMKWTNLLYKAEGVKIRDDERLLQEALKRKEKRRAQRQRRWEKRTAGVVEKMQQRQDRRRQNLRRKKAARAERRLLRARKKGRILPQDLERAGLV

SEQ ID NO: 184 - protein, 329 aa, Homo sapiens
MAEAATPGTTATTSGAGAAAATAAAASPTPIPTVTAPSLGAGGGGGGSDGSGGGWTKQVTCRYFMHGVCKEGDNCRYSHDLSDSPYSVVCKYFQRGYCIYGDRCRYEHSKPLKQEEATATELTTKSSLAASSSLSSIVGPLVEMNTGEAESRNSNFATVGAGSEDWVNAIEFVPGQPYCGRTAPSCTEAPLQGSVTKEESEKEQTAVETKKQLCPYAAVGECRYGENCVYLHGDSCDMCGLQVLHPMDAAQRSQHIKSCIEAHEKDMELSFAVQRSKDMVCGICMEVVYEKANPSERRFGILSNCNHTYCLKCIRKWRSAKQFESKIIK

SEQ ID NO: 185 - protein, 197 aa, Homo sapiens
MGNHAGKRELNAEKASTNSETNRGESEKKRNLGELSRTTSEDNEVFGEADANQNNGTSSQDTAVTDSKRTADPKNAWQDAHPADPGSRPHLIRLFSRDAPGREDNTFKDRPSESDELQTIQEDSAATSESLDVMASQKRPSQRHGSKYLATASTMDHARHGFLPRHRDTGILDSIGRFFGGDRGAPKRGSGKVSSEE

SEQ ID NO: 186 - protein, 858 aa, Homo sapiens
MVNFTVDQIRAIMDKKANIRNMSVIAHVDHGKSTLTDSLVCKAGIIASARAGETRFTDTRKDEQERCITIKSTAISLFYELSENDLNFIKQSKDGAGFLINLIDSPGHVDFSSEVTAALRVTDGALVVVDCVSGVCVQTETVLRQAIAERIKPVLMMNKMDRALLELQLEPEELYQTFQRIVENVNVIISTYGEGESGPMGNIMIDPVLGTVGFGSGLHGWAFTLKQFAEMYVAKFAAKGEGQLGPAERAKKVEDMMKKLWGDRYFDPANGKFSKSATSPEGKKLPRTFCQLILDPIFKVFDAIMNFKKEETAKLIEKLDIKLDSEDKDKEGKPLLKAVMRRWLPAGDALLQMITIHLPSPVTAQKYRCELLYEGPPDDEAAMGIKSCDPKGPLMMYISKMVPTSDKGRFYAFGRVFSGLVSTGLKVRIMGPNYTPGKKEDLYLKPIQRTILMMGRYVEPIEDVPCGNIVGLVGVDQFLVKTGTITTFEHAHNMRVMKFSVSPVVRVAVEAKNPADLPKLVEGLKRLAKSDPMVQCIIEESGEHIIAGAGELHLEICLKDLEEDHACIPIKKSDPVVSYRETVSEESNVLCLSKSPNKHNRLYMKARPFPDGLAEDIDKGEVSARQELKQRARYLAEKYEWDVAEARKIWCFGPDGTGPNILTDITKGVQYLNEIKDSVVAGFQWATKEGALCEENMRGVRFDVHDVTLHADAIHRGGGQIIPTARRCLYASVLTAQPRLMEPIYLVEIQCPEQVVGGIYGVLNRKRGHVFEESQVAGTPMFVVKAYLPVNESFGFTADLRSNTGGQAFPQCVFDHWQILPGDPFDNSSRPSQVVAETRKRKGLKEGIPALDNFLDKL

SEQ ID NO: 187 - protein, 260 aa, Homo sapiens
MAGSPLLWGPRAGGVGLLVLLLLGLFRPPPALCARPVKEPRGLSAASPPLAETGAPRRFRRSVPRGEAAGAVQELARALAHLLEAERQERARAEAQEAEDQQARVLAQLLRVWGAPRNSDPALGLDDDPDAPAAQLARALLRARLDPAALAAQLVPAPVPAAALRPRPPVYDDGPAGPDAEEAGDETPDVDPELLRYLLGRILAGSADSEGVAAPRRLRRAADHDVGSELPPEGVLGALLRVKRLETPAPQVPARRLLPP

SEQ ID NO: 188 - protein, 102 aa, Homo sapiens [sequence omitted]

SEQ ID NO: 189 - protein, 183 aa, Homo sapiens [sequence omitted]

SEQ ID NO: 190 - protein, 101 aa, Homo sapiens [sequence omitted]

SEQ ID NO: 191 - protein, 1312 aa, Homo sapiens
MEEEDESRGKTEESGEDRGDGPPDRDPTLSPSAFILRAIQQAVGSSLQGDLPNDKDGSRCHGLRWRRCRSPRSEPRSQESGGTDTATVLDMATDSFLAGLVSVLDPPDTWVPSRLDLRPGESEDMLELVAEVRIGDRDPIPLPVPSLLPRLRAWRTGKTVSPQSNSSRPTCARHLTLGTGDGGPAPPPAPSSASSSPSPSPSSSSPSPPPPPPPPAPPAPPAPRFDIYDPFHPTDEAYSPPPAPEQKYDPFEPTGSNPSSSAGTPSPEEEEEEEEEEEEEEEDEEEEEGLSQSISRISETLAGIYDDNSLSQDFPGDESPRPDAQPTQPTPAPGTPPQVDSTRADGAMRRRVFVVGTEAEACREGKVSVEVVTAGGAALPPPLLPPGDSEIEEGEIVQPEEEPRLALSLFRPGGRAARPPPAASATPTAQPLPQPPAPRAPEGDDFLSLHAESDGEGALQVDLGEPAPAPPAADSRWGGLDLRRKILTQRRERYRQRSPSPAPAPAPAAAAGPPTRKKSRRERKRSGEAKEAASSSSGTQPAPPAPASPWDSKKHRSRDRKPGSHASSSARRRSRSRSRSRSTRRRSRSTDRRRGGSRRSRSREKRRRRRRSASPPPATSSSSSSRRERHRGKHRDGGGSKKKKKRSRSRGEKRSGDGSEKAPAPAPPPSGSTSCGDRDSRRRGAVPPSIQDLTDHDLFAIKRTITVGRLDKSDPRGPSPAPASSPKREVLYDSEGLSGEERGGKSSQKDRRRSGAASSSSSSREKGSRRKALDGGDRDRDRDRDRDRDRSSKKARPPKESAPSSGPPPKPPVSSGSGSSSSSSSCSSRKVKLQSKVAVLIREGVSSTTPAKDAASAGLGSIGVKFSRDRESRSPFLKPDERAPTEMAKAAPGSTKPKKTKVKAKAGAKKTKGTKGKTKPSKTRKKVRSGGGSGGSGGQVSLKKSKADSCSQAAGTKGAEETSWSGEERAAKVPSTPPPKAAPPPPALTPDSQTVDSSCKTPEVSFLPEEATEEAGVRGGAEEEEEEEEEEEEEEEEEEQQPATTTATSTAAAAPSTAPSAGSTAGDSGAEDGPASRVSQLPTLPPPMPWNLPAGVDCTTSGVLALTALLFKMEEANLASRAKAQELIQATNQILSHRKPPSSLGMTPAPVPTSLGLPPGPSSYLLPGSLPLGGCGSTPPTPTGLAATSDKREGSSSSEGRGDTDKYLKKLHTQERAVEEVKLAIKPYYQKKDITKEEYKDILRKAVHKICHSKSGEINPVKVSNLVRAYVQRYRYFRKHGRKPGDPPGPPRPPKEPGPPDKGGPGLPLPPL

SEQ ID NO: 192 - protein, 2843 aa, Homo sapiens
MAAASYDQLLKQVEALKMENSNLRQELEDNSNHLTKLETEASNMKEVLKQLQGSIEDEAMASSGQIDLLERLKELNLDSSNFPGVKLRSKMSLRSYGSREGSVSSRSGECSPVPMGSFPRRGFVNGSRESTGYLEELEKERSLLLADLDKEEKEKDWYYAQLQNLTKRIDSLPLTENFSLQTDMTRRQLEYEARQIRVAMEEQLGTCQDMEKRAQRRIARIQQIEKDILRIRQLLQSQATEAERSSQNKHETGSHDAERQNEGQGVGEINMATSGNGQGSTTRMDHETASVLSSSSTHSAPRRLTSHLGTKVEMVYSLLSMLGTHDKDDMSRTLLAMSSSQDSCISMRQSGCLPLLIQLLHGNDKDSVLLGNSRGSKEARARASAALHNIIHSQPDDKRGRREIRVLHLLEQIRAYCETCWEWQEAHEPGMDQDKNPMPAPVEHQICPAVCVLMKLSFDEEHRHAMNELGGLQAIAELLQVDCEMYGLTNDHYSITLRRYAGMALTNLTFGDVANKATLCSMKGCMRALVAQLKSESEDLQQVIASVLRNLSWRADVNSKKTLREVGSVKALMECALEVKKESTLKSVLSALWNLSAHCTENKADICAVDGALAFLVGTLTYRSQTNTLAIIESGGGILRNVSSLIATNEDHRQILRENNCLQTLLQHLKSHSLTIVSNACGTLWNLSARNPKDQEALWDMGAVSMLKNLIHSKHKMIAMGSAAALRNLMANRPAKYKDANIMSPGSSLPSLHVRKQKALEAELDAQHLSETFDNIDNLSPKASHRSKQRHKQSLYGDYVFDTNRHDDNRSDNFNTGNMTVLSPYLNTTVLPSSSSSRGSLDSSRSEKDRSLERERGIGLGNYHPATENPGTSSKRGLQISTTAAQIAKVMEEVSAIHTSQEDRSSGSTTELHCVTDERNALRRSSAAHTHSNTYNFTKSENSNRTCSMPYAKLEYKRSSNDSLNSVSSSDGYGKRGQMKPSIESYSEDDESKFCSYGQYPADLAHKIHSANHMDDNDGELDTPINYSLKYSDEQLNSGRQSPSQNERWARPKHIIEDEIKQSEQRQSRNQSTTYPVYTESTDDKHLKFQPHFGQQECVSPYRSRGANGSETNRVGSNHGINQNVSQSLCQEDDYEDDKPTNYSERYSEEEQHEEEERPTNYSIKYNEEKRHVDQPIDYSLKYATDIPSSQKQSFSFSKSSSGQSSKTEHMSSSSENTSTPSSNAKRQNQLHPSSAQSRSGQPQKAATCKVSSINQETIQTYCVEDTPICFSRCSSLSSLSSAEDEIGCNQTTQEADSANTLQIAEIKEKIGTRSAEDPVSEVPAVSQHPRTKSSRLQGSSLSSESARHKAVEFSSGAKSPSKSGAQTPKSPPEHYVQETPLMFSRCTSVSSLDSFESRSIASSVQSEPCSGMVSGIISPSDLPDSPGQTMPPSRSKTPPPPPQTAQTKREVPKNKAPTAEKRESGPKQAAVNAAVQRVQVLPDADTLLHFATESTPDGFSCSSSLSALSLDEPFIQKDVELRIMPPVQENDNGNETESEQPKESNENQEKEAEKTIDSEKDLLDDSDDDDIEILEECIISAMPTKSSRKAKKPAQTASKLPPPVARKPSQLPVYKLLPSQNRLQPQKHVSFTPGDDMPRVYCVEGTPINFSTATSLSDLTIESPPNELAAGEGVRGGAQSGEFEKRDTIPTEGRSTDEAQGGKTSSVTIPELDDNKAEEGDILAECINSAMPKGKSHKPFRVKKIMDQVQQASASSSAPNKNQLDGKKKKPTSPVKPIPQNTEYRTRVRKNADSKNNLNAERVFSDNKDSKKQNLKNNSKVFNDKLPNNEDRVRGSFAFDSPHHYTPIEGTPYCFSRNDSLSSLDFDDDDVDLSREKAELRKAKENKESEAKVTSHTELTSNQQSANKTQAIAKQPINRGQPKPILQKQSTFPQSSKDIPDRGAATDEKLQNFAIENTPVCFSHNSSLSSLSDIDQENNNKENEPIKETEPPDSQGEPSKPQASGYAPKSFHVEDTPVCFSRNSSLSSLSIDSEDDLLQECISSAMPKKKKPSRLKGDNEKHSPRNMGGILGEDLTLDLKDIQRPDSEHGLSPDSENFDWKAIQEGANSIVSSLHQAAAAACLSRQASSDSDSILSLKSGISLGSPFHLTPDQEEKPFTSNKGPRILKPGEKSTLETKKIESESKGIKGGKKVYKSLITGKVRSNSEISGQMKQPLQANMPSISRGRTMIHIPGVRNSSSSTSPVSKKGPPLKTPASKSPSEGQTATTSPRGAKPSVKSELSPVARQTSQIGGSSKAPSRSGSRDSTPSRPAQQPLSRPIQSPGRNSISPGRNGISPPNKLSQLPRTSSPSTASTKSSGSGKMSYTSPGRQMSQQNLTKQTGLSKNASSIPRSESASKGLNQMNNGNGANKKVELSRMSSTKSSGSESDRSERPVLVRQSTFIKEAPSPTLRRKLEESASFESLSPSSRPASPTRSQAQTPVLSPSLPDMSLSTHSSVQAGGWRKLPPNLSPTIEYNDGRPAKRHDIARSHSESPSRLPINRSGTWKREHSKHSSSLPRVSTWRRTGSSSSILSASSESSEKAKSEDEKHVNSISGTKQSKENQVSAKGTWRKIKENEFSPTNSTSQTVSSGATNGAESKTLIYQMAPAVSKTEDVWVRIEDCPINNPRSGRSPTGNTPPVIDSVSEKANPNIKDSKDNQAKQNVGNGSVPMRTVGLENRLNSFIQVDAPDQKGTEIKPGQNNPVPVSETNESSIVERTPFSSSSSSKHSSPSGTVAARVTPFNYNPSPRKSSADSTSARPSQIPTPVNNNTKKRDSKTDSTESSGTQSPKRHSGSYLVTSV

SEQ ID NO: 193 - protein, 190 aa, Homo sapiens
MFQVPDSEGGRAGSRAMKPPGGESSNLFGSPEEATPSSRPNRMASNIFGPTEEPQNIPKRTNPPGGKGSGIFDESTPVQTRQHLNPPGGKTSDIFGSPVTATSRLAHPNKPKDHVFLCEGEEPKSDLKAARSIPAGAEPGEKGSARKAGPAKEQEPMPTVDSHEPRLGPRPRSHNKVLNPPGGKSSISFY

SEQ ID NO: 194 - protein, 106 aa, Homo sapiens
MMATGTPESQARFGQSVKGLLTEKVTTCGTDVIALTKQVLKGSRSSELLGQAARNMVLQEDAILHSEDSLRKMAIITTHLQYQQEAIQKNVEQSSDLQDQLNHLLK

SEQ ID NO: 195 - protein, 1043 aa, Homo sapiens
MRRFKRKHLTAIDCQHLARSHLAVTQPFGQRWTNRDPNHGLYPKPRTKRGSRGQGSQRCIPEFFLAGKQPCTNDMAKSNSVGQDSCQDSEGDMIFPAESSCALPQEGSAGPGSPGSAPPSRKRSWSSEEESNQATGTSRWDGVSKKAPRHHLSVPCTRPREARQEAEDSTSRLSAESGETDQDAGDVGPDPIPDSYYGLLGTLPCQEALSHICSLPSEVLRHVFAFLPVEDLYWNLSLVCHLWREIISDPLFIPWKKLYHRYLMNEEQAVSKVDGILSNCGIEKESDLCVLNLIRYTATTKCSPSVDPERVLWSLRDHPLLPEAEACVRQHLPDLYAAAGGVNIWALVAAVVLLSSSVNDIQRLLFCLRRPSSTVTMPDVTETLYCIAVLLYAMREKGINISNRIHYNIFYCLYLQENSCTQATKVKEEPSVWPGKKTIQLTHEQQLILNHKMEPLQVVKIMAFAGTGKTSTLVKYAEKWSQSRFLYVTFNKSIAKQAERVFPSNVICKTFHSMAYGHIGRKYQSKKKLNLFKLTPFMVNSVLAEGKGGFIRAKLVCKTLENFFASADEELTIDHVPIWCKNSQGQRVMVEQSEKLNGVLEASRLWDNMRKLGECTEEAHQMTHDGYLKLWQLSKPSLASFDAIFVDEAQDCTPAIMNIVLSQPCGKIFVGDPHQQIYTFRGAVNALFTVPHTHVFYLTQSFRFGVEIAYVGATILDVCKRVRKKTLVGGNHQSGIRGDAKGQVALLSRTNANVFDEAVRVTEGEFPSRIHLIGGIKSFGLDRIIDIWILLQPEEERRKQNLVIKDKFIRRWVHKEGFSGFKRYVTAAEDKELEAKIAVVEKYNIRIPELVQRIEKCHIEDLDFAEYILGTVHKAKGLEFDTVHVLDDFVKVPCARHNLPQLPHFRVESFSEDEWNLLYVAVTRAKKRLIMTKSLENILTLAGEYFLQAELTSNVLKTGVVRCCVGQCNNAIPVDTVLTMKKLPITYSNRKENKGGYLCHSCAEQRIGPLAFLTASPEQVRAMERTVENIVLPRHEALLFLVF

SEQ ID NO: 196 - protein, 586 aa, Homo sapiens
MSATVVDAVNAAPLSGSKEMSLEEPKKMTREDWRKKKELEEQRKLGNAPAEVDEEGKDINPHIPQYISSVPWYIDPSKRPTLKHQRPQPEKQKQFSSSGEWYKRGVKENSIITKYRKGACENCGAMTHKKKDCFERPRRVGAKFTGTNIAPDEHVQPQLMFDYDGKRDRWNGYNPEEHMKIVEEYAKVDLAKRTLKAQKLQEELASGKLVEQANSPKHQWGEEEPNSQMEKDHNSEDEDEDKYADDIDMPGQNFDSKRRITVRNLRIREDIAKYLRNLDPNSAYYDPKTRAMRENPYANAGKNPDEVSYAGDNFVRYTGDTISMAQTQLFAWEAYDKGSEVHLQADPTKLELLYKSFKVKKEDFKEQQKESILEKYGGQEHLDAPPAELLLAQTEDYVEYSRHGTVIKGQERAVACSKYEEDVKIHNHTHIWGSYWKEGRWGYKCCHSFFKYSYCTGEAGKEIVNSEECIINEITGEESVKKPQTLMELHQEKLKEEKKKKKKKKKKHRKSSSDSDDEEKKHEKLKKALNAEEARLLHVKETMQIDERKRPYNSMYETREPTEEEMEAYRMKRQRPDDPMASFLGQ

SEQ ID NO: 197 - protein, 1221 aa, Homo sapiens
MLRSTGFFRAIDCPYWSGAPGGPCRRPYCHFRHRGARGSGAPGDGGEAPPAAGLGYDPYNPELPKPPAQRENGTLGLGEEPRPDVLELELVNQAIEAVRSEVELEQRRYRELLETTREHRSAEAPALAPRGPNASPTVGPDEDAFPLAFDYSPGSHGLLSPDAGYQPTPLAAPAEPGSKYSLASLDRGQGRGGGGGGALEYVPKAVSQPRRHSRPVPSGKYVVDNSRPPTDLEYDPLSNYSARHLSRASSRDERAAKRPRGSRGSEPYTPAPKKLCDPFGSCDARFSDSEDEAATVPGNEPTTASTPKARADPEIKATGQPPSKEGLEAEGGGLRETKETAVQCDVGDLQPPPAKPASPAQVQSSQDGGCPKEGKPKKKKTGAPPAPSCKDGAQGKDKTKDKGRGRPVEKPRADKKGPQASSPRRKAERPEGTKKKPSSATPVATSGKGRPDRPARRPSPTSGDSRPAAGRGPPRPLQLPDRKSTKAPSGKLVERKARSLDEGASQDAPKLKKRALSHADLFGDESEDEAAGPGVPSVWPSALPSLSSDSDSDSDSSLGFPEAQGPPKRLKASPPPSPAPSSSSSSSSSTSSAGADVDYSALEKEVDFDSDPMEECLRIFNESTSVKTEDRGRLARQPPKEEKSEEKGLSGLTTLFPGQKRRISHLSKQGQEVEPPRRGPAVPPARPPTAQEVCYLRAQQAQRASASLLQAPARLAEKSPSVHISAPGEKRRIAHIPNPRLAAAPTGAKRTLAASGSQSSNGPEPGGQQLKTRTLSGMASKTTTTIIPKRIAHSPSLQSLKKPIIPKEFGGKVPTVIRQRYLNLFIEECLKFCTSNQEAIEKALNEEKVAYDRSPSKNIYLNVAVNTLKKLRGLAPSAVPGLSKTSGRRVVSHEVVLGGRLAAKTSFSLSRPSSPRVEDLKGAALYSRLREYLLTQDQLKENGYPFPHPERPGGAIIFTAEEKRPKDSSCRTCCRCGTEYLVSSSGRCIRDEECYYHWGRLRRNRVAGGWETQYMCCSAAAGSVGCQVAKQHVQDGRKERLEGFVKTFEKELSGDTHPGIYALDCEMSYTTYGLELTRVTVVDTDVHVVYDTFVKPDNEIVDYNTRFSGVTEADLADTSVTLRDVQAVLLSMFSADTILIGHSLESDLLALKVIHSTVVDTSVLFPHRLGLPYKRSLRNLMADYLRQIIQDNVDGHSSSEDAGACMHLVIWKVREDAKTKR

SEQ ID NO: 198 - protein, 144 aa, Homo sapiens
MYSEIQRERADIGGLMARPEYREWNPELIKPKKLLNPVKASRSHQELHRELLMNHRRGLGVDSKPELQRVLEHRRRNQLIKKKKEELEAKRLQCPFEQELLRRQQRLNQLEKPPEKEEDHAPEFIKVRENLRRIATLTSEEREL

SEQ ID NO: 199 - protein, 429 aa, Homo sapiens
MSRDPGSGGWEEAPRAAAALCTLYHEAGQRLRRLQDQLAARDALIARLRARLAALEGDAAPSLVDALLEQVARFREQLRRQEGGAAEAQMRQEIERLTERLEEKEREMQQLLSQPQHEREKEVVLLRRSMAEGERARAASDVLCRSLANETHQLRRTLTATAHMCQHLAKCLDERQHAQRNVGERSPDQSEHTDGHTSVQSVIEKLQEENRLLKQKVTHVEDLNAKWQRYNASRDEYVRGLHAQLRGLQIPHEPELMRKEISRLNRQLEEKINDCAEVKQELAASRTARDAALERVQMLEQQILAYKDDFMSERADRERAQSRIQELEEKVASLLHQVSWRQDSREPDAGRIHAGSKTAKYLAADALELMVPGGWRPGTGSQQPEPPAEGGHPGAAQRGQGDLQCPHCLQCFSDEQGEELLRHVAECCQ

SEQ ID NO: 200 - protein, 289 aa, Homo sapiens
MAGAGRGAAVSRVQAGPGSPRRARGRQQVQPLGKQRPAPWPGLRSKEKKKVNCKPKNQDEQEIPFRLREIMRSRQEMKNPISNKKRKKAAQVTFRKTLEKEAKGEEPDIAVPKFKQRKGESDGAYIHRMQQEAQHVLFLSKNQAIRQPEVQAAPKEKSEQKKAKKAFQKRRLDKVRRKKEEKAADRLEQELLRDTVKFGEVVLQPPELTARPQRSVSKDQPGRRSQMLRMLLSPGGVSQPLTASLARQRIVEEERERAVQAYRALKQRQQQLHGERPHLTSRKKPEPQL

SEQ ID NO: 201 - protein, 490 aa, Homo sapiens
MKPKLMYQELKVPAEEPANELPMNEIEAWKAAEKKARWVLLVLILAVVGFGALMTQLFLWEYGDLHLFGPNQRPAPCYDPCEAVLVESIPEGLDFPNASTGNPSTSQAWLGLLAGAHSSLDIASFYWTLTNNDTHTQEPSAQQGEEVLRQLQTLAPKGVNVRIAVSKPSGPQPQADLQALLQSGAQVRMVDMQKLTHGVLHTKFWVVDQTHFYLGSANMDWRSLTQVKELGVVMYNCSCLARDLTKIFEAYWFLGQAGSSIPSTWPRFYDTRYNQETPMEICLNGTPALAYLASAPPPLCPSGRTPDLKALLNVVDNARSFIYVAVMNYLPTLEFSHPHRFWPAIDDGLRRATYERGVKVRLLISCWGHSEPSMRAFLLSLAALRDNHTHSDIQVKLFVVPADEAQARIPYARVNHNKYMVTERATYIGTSNWSGNYFTETAGTSLLVTQNGRGGLRSQLEAIFLRDWDSPYSHDLDTSADSVGNACRLL

SEQ ID NO: 202 - protein, 372 aa, Homo sapiens
MSLRCGDAARTLGPRVFGRYFCSPVRPLSSLPDKKKELLQNGPDLQDFVSGDLADRSTWDEYKGNLKRQKGERLRLPPWLKTEIPMGKNYNKLKNTLRNLNLHTVCEEARCPNIGECWGGGEYATATATIMLMGDTCTRGCRFCSVKTARNPPPLDASEPYNTAKAIAEWGLDYVVLTSVDRDDMPDGGAEHIAKTVSYLKERNPKILVECLTPDFRGDLKAIEKVALSGLDVYAHNVETVPELQSKVRDPRANFDQSLRVLKHAKKVQPDVISKTSIMLGLGENDEQVYATMKALREADVDCLTLGQYMQPTRRHLKVEEYITPEKFKYWEKVGNELGFHYTASGPLVRSSYKAGEFFLKNLVAKRKTKDL

SEQ ID NO: 203 - protein, 266 aa, Homo sapiens [sequence omitted]

SEQ ID NO: 204 - protein, 316 aa, Homo sapiens
MSVGFIGAGQLAFALAKGFTAAGVLAAHKIMASSPDMDLATVSALRKMGVKLTPHNKETVQHSDVLFLAVKPHIIPFILDEIGADIEDRHIVVSCAAGVTISSIEKKLSAFRPAPRVIRCMTNTPVVVREGATVYATGTHAQVEDGRLMEQLLSSVGFCTEVEEDLIDAVTGLSGSGPAYAFTALDALADGGVKMGLPRRLAVRLGAQALLGAAKMLLHSEQHPGQLKDNVSSPGGATIHALHVLESGGFRSLLINAVEASCIRTRELQSMADQEQVSPAAIKKTILDKDHLPLELGSPEGLHPLLLQYQLARAPS

SEQ ID NO: 205 - protein, 1150 aa, Homo sapiens
MKLKKQVTVCGAAIFCVAVFSLYLMLDRVQHDPTRHQNGGNFPRSQISVLQNRIEQLEQLLEENHEIISHIKDSVLELTANAEGPPAMLPYYTVNGSWVVPPEPRPSFFSISPQDCQFALGGRGQKPELQMLTVSEELPFDNVDGGVWRQGFDISYDPHDWDAEDLQVFVVPHSHNDPGWIKTFDKYYTEQTQHILNSMVSKLQEDPRRRFLWAEVSFFAKWWDNINVQKRAAVRRLVGNGQLEIATGGWVMPDEANSHYFALIDQLIEGHQWLERNLGATPRSGWAVDPFGYSSTMPYLLRRANLTSMLIQRVHYAIKKHFAATHSLEFMWRQTWDSDSSTDIFCHMMPFYSYDVPHTCGPDPKICCQFDFKRLPGGRINCPWKVPPRAITEANVAERAALLLDQYRKKSQLFRSNVLLVPLGDDFRYDKPQEWDAQFFNYQRLFDFFNSRPNLHVQAQFGTLSDYFDALYKRTGVEPGARPPGFPVLSGDFFSYADREDHYWTGYYTSRPFYKSLDRVLEAHLRGAEVLYSLAAAHARRSGLAGRYPLSDFTLLTEARRTLGLFQHHDAITGTAKEAVVVDYGVRLLRSLVNLKQVIIHAAHYLVLGDKETYHFDPEAPFLQVDDTRLSHDALPERTVIQLDSSPRFVVLFNPLEQERFSMVSLLVNSPRVRVLSEEGQPLAVQISAHWSSATEAVPDVYQVSVPVRLPALGLGVLQLQLGLDGHRTLPSSVRIYLHGRQLSVSRHEAFPLRVIDSGTSDFALSNRYMQVWFSGLTGLLKSIRRVDEEHEQQVDMQVLVYGTRTSKDKSGAYLFLPDGEAKPYVPKEPPVLRVTEGPFFSEVVAYYEHIHQAVRLYNLPGVEGLSLDISSLVDIRDYVNKELALHIHTDIDSQGIFFTDLNGFQVQPRRYLKKLPLQANFYPMPVMAYIQDAQKRLTLHTAQALGVSSLKDGQLEVILDRRLMQDDNRGLGQGLKDNKRTCNRFRLLLERRTVGSEVQDSHSTSYPSLLSHLTSMYLNAPALALPVARMQLPGPGLRSFHPLASSLPCDFHLLNLRTLQAEEDTLPSAETALILHRKGFDCGLEAKNLGFNCTTSQGKVALGSLFHGLDVVFLQPTSLTLLYPLASPSNSTDVYLEPMEIATFRLRLG

SEQ ID NO: 206 - protein, 219 aa, Homo sapiens
MNRLFGKAKPKAPPPSLTDCIGTVDSRAESIDKKISRLDAELVKYKDQIKKMREGPAKNMVKQKALRVLKQKRMYEQQRDNLAQQSFNMEQANYTIQSLKDTKTTVDAMKLGVKEMKKAYKQVKIDQIEDLQDQLEDMMEDANEIQEALSRSYGTPELDEDDLEAELDALGDELLADEDSSYLDEAASAPAIPEGVPTDTKNKDGVLVDEFGLPQIPAS

SEQ ID NO: 207 - protein, 465 aa, Homo sapiens
MTPVRMQHSLAGQTYAVPLIQPDLRREEAVQQMADALQYLQKVSGDIFSRISQRVEQSRSQVQAIGEKVSLAQAKIEKIKGSKKAIKVFSSAKYPAPERLQEYGSIFTGAQDPGLQRRPRHRIQSKHRPLDERALQEKLKDFPVCVSTKPEPEDDAEEGLGGLPSNISSVSSLLLFNTTENLYKKYVFLDPLAGAVTKTHVMLGAETEEKLFDAPLSISKREQLEQQVPENYFYVPDLGQVPEIDVPSYLPDLPGIANDLMYSADLGPGIAPSAPGTIPELPTFHTEVAEPLKVDLQDGVLTPPPPPPPPPPAPEVLASAPPLPPSTAAPVGQGARQDDSSSSASPSVQGAPREVVDPSGGRATLLESIRQAGGIGKAKLRSVKERKLEKKKQKEQEQVRATSQGGDLMSDLFNKLVMRRKGISGKGPGAGEGPGGAFARVSDSIPPLPPPQQPQAEEDEDDWES

SEQ ID NO: 208 - protein, 240 aa, Homo sapiens
MSRSNRQKEYKCGDLVFAKMKGYPHWPARIDEMPEAAVKSTANKYQVFFFGTHETAFLGPKDLFPYEESKEKFGKPNKRKGFSEGLWEIENNPTVKASGYQSSQKKSCVEEPEPEPEAAEGDGDKKGNAEGSSDEEGKLVIDEPAKEKNEKGALKRRAGDLLEDSPKRPKEAENPEGEEKEAATLEVERPLPMEVEKNSTPSEPGSGRGPPQEEEEEEDEEEEATKEDAEAPGIRDHESL

SEQ ID NO: 209 - protein, 224 aa, homo sapiens
MSVFGKLFGAGGGKAGKGGPTPQEAIQRLRDTEEMLSKKQEFLEKKIEQELTAAKKHGTKNKRAALQALKRKKRYEKQLAQIDGTLSTIEFQREALENANTNTEVLKNMGYAAKAMKAAHDNMDIDKVDELMQDIADQQELAEEISTAISKPVGFGEEFDEDELMAELEELEQEELDKNLLEISGPETVPLPNVPSIALPSKPAKKKEEEDDDMKELENWAGSM

SEQ ID NO: 210 - protein, 283 aa, Homo sapiens
MAVPPTYADLGKSARDVFTKGYGFGLIKLDLKTKSENGLEFTSSGSANTETTKVTGSLETKYRWTEYGLTFTEKWNTDNTLGTEITVEDQLARGLKLTFDSSFSPNTGKKNAKIKTGYKREHINLGCDMDFDIAGPSIRGALVLGYEGWLAGYQMNFETAKSRVTQSNFAVGYKTDEFQLHTNVNDGTEFGGSIYQKVNKKLETAVNLAWTAGNSNTRFGIAAKYQIDPDACFSAKVNNSSLIGLGYTQTLKPGIKLTLSALLDGKNVNAGGHKLGLGLEFQA

SEQ ID NO: 211 - protein, 1005 aa, Homo sapiens
MTTEVGSVSEVKKDSSQLGTDATKEKPKEVAENQQNQSSDPEEEKGSQPPPAAESQSSLRRQKREKETSESRGISRFIPPWLKKQKSYTLVVAKDGGDKKEPTQAVVEEQVLDKEEPLPEEQRQAKGDAEEMAQKKQEIKVEVKEEKPSVSKEEKPSVSKVEMQPTELVSKEREEKVKETQEDKLEGGAAKRETKEVQTNELKAEKASQKVTKKTKTVQCKVTLLDGTEYSCDLEKHAKGQVLFDKVCEHLNLLEKDYFGLLFQESPEQKNWLDPAKEIKRQLRNLPWLFTFNVKFYPPDPSQLTEDITRYFLCLQLRQDIASGRLPCSFVTHALLGSYTLQAELGDYDPEEHGSIDLSEFQFAPTQTKELEEKVAELHKTHRGLSPAQADSQFLENAKRLSMYGVDLHHAKDSEGVDIKLGVCANGLLIYKDRLRINRFAWPKILKISYKRSNFYIKVRPAELEQFESTIGFKLPNHRAAKRLWKVCVEHHTFYRLVSPEQPPKAKFLTLGSKFRYSGRTQAQTRQASTLIDRPAPHFERTSSKRVSRSLDGAPIGVMDQSLMKDFPGAAGEISAYGPGLVSIAVVQDGDGRREVRSPTKAPHLQLIEGKKNSLRVEGDNIYVRHSNLMLEELDKAQEDILKHQASISELKRNFMESTPEPRPNEWEKRRITPLSLQTQGSSHETLNIVEEKKRAEVGKDERVITEEMNGKEISPGSGPGEIRKVEPVTQKDSTSLSSESSSSSSESEEEDVGEYRPHHRVTEGTIREEQEYEEEVEEEPRPAAKVVEREEAVPEASPVTQAGASVITVETVIQENVGAQKIPGEKSVHEGALKQDMGEEAEEEPQKVNGEVSHVDIDVLPQIICCSEPPVVKTEMVTISDASQRTEISTKEVPIVQTETKTITYESPQIDGGAGGDSGTLLTAQTITSESVSTTTTTHITKTVKGGISETRIEKRIVITGDGDIDHDQALAQAIREAREQHPDMSVTRVVVHKETELAEEGED

SEQ ID NO: 212 - protein, 461 aa, Homo sapiens
MPPSGPRGTLLLLPLLLLLLLRAVLAVPLERGAPNKEETPATESPDTGLYYHRYLQEVIDVLETDGHFREKLQAANAEDIKSGKLSRELDFVSHHVRTKLDELKRQEVSRLRMLLKAKMDAEQDPNVQVDHLNLLKQFEHLDPQNQHTFEARDLELLIQTATRDLAQYDAAHHEEFKRYEMLKEHERRRYLESLGEEQRKEAERKLEEQQRRHREHPKVNVPGSQAQLKEVWEELDGLDPNRFNPKTFFILHDINSDGVLDEQELEALFTKELEKVYDPKNEEDDMREMEEERLRMREHVMKNVDTNQDRLVTLEEFLASTQRKEFGDTGEGWETVEMHPAYTEEELRRFEEELAAREAELNAKAQRLSQETEALGRSQGRLEAQKRELQQAVLHMEQRKQQQQQQQGHKAPAAHPEGQLKFHPDTDDVPVPAPAGDQKEVDTSEKKLLERLPEVEVPQHL

SEQ ID NO: 213 - protein, 466 aa, Homo sapiens
MSTRSVSSSSYRRMFGGPGTASRPSSSRSYVTTSTRTYSLGSALRPSTSRSLYASSPGGVYATRSSAVRLRSSVPGVRLLQDSVDFSLADAINTEFKNTRTNEKVELQELNDRFANYIDKVRFLEQQNKILLAELEQLKGQGKSRLGDLYEEEMRELRRQVDQLTNDKARVEVERDNLAEDIMRLREKLQEEMLQREEAENTLQSFRQDVDNASLARLDLERKVESLQEEIAFLKKLHEEEIQELQAQIQEQHVQIDVDVSKPDLTAALRDVRQQYESVAAKNLQEAEEWYKSKFADLSEAANRNNDALRQAKQESTEYRRQVQSLTCEVDALKGTNESLERQMREMEENFAVEAANYQDTIGRLQDEIQNMKEEMARHLREYQDLLNVKMALDIEIATYRKLLEGEESRISLPLPNFSSLNLRETNLDSLPLVDTHSKRTLLIKTVETRDGQVINETSQHHDDLE

SEQ ID NO: 214 - protein, 485 aa, Homo sapiens
MALPPFFGQGRPGPPPPQPPPPAPFGCPPPPLPSPAFPPPLPQRPGPFPGASAPFLQPPLALQPRASAEASRGGGGAGAFYPVPPPPLPPPPPQCRPFPGTDAGERPRPPPPGPGPPWSPRWPEAPPPPADVLGDAALQRLRDRQWLEAVFGTPRRAGCPVPQRTHAGPSLGEVRARLLRALRLVRRLRGLSQALREAEADGAAWVLLYSQTAPLRAELAERLQPLTQAAYVGEARRRLERVRRRRLRLRERAREREAEREAEAARAVEREQEIDRWRVKCVQEVEEKKREQELKAAADGVLSEVRKKQADTKRMVDILRALEKLRKLRKEAAARKGVCPPASADETFTHHLQRLRKLIKKRSELYEAEERALRVMLEGEQEEERKRELEKKQRKEKEKILLQKREIESKLFGDPDEFPLAHLLEPFRQYYLQAEHSLPALIQIRHDWDQYLVPSDHPKGNFVPQGWVLPPLPSNDIWATAVKLH

SEQ ID NO: 215 - protein, 84 aa, Homo sapiens
MRGSHHHHHHGSYLGDTIESSTHASGELKRNFMESTPEPPPSEWEKRRITPLSLQTEGHVLPTPKALGLEPGMRLTHQWKKQRW

SEQ ID NO: 216 - protein, 66 aa, Homo sapiens
MRGSHHHHHHGSYLGDTIESSTHASAWMSRSWRHSSPRSWRKCTTQRMRRTTCGRWRRSDCACGSM

SEQ ID NO: 217 - protein, 100 aa, Homo sapiens
MRGSHHHHHHGSYLGDTIESSTHASALRGPRARDAAALPPPTPTAPSFASSPGASPRHRRRPGHRHPPQPCPPGPCPRPPTAGCSAARAPRAGRAPAGAT

SEQ ID NO: 218 - protein, 132 aa, Homo sapiens
MRGSHHHHHHGSYLGDTIESSTHASAHASGRSARAIAPGSAPGAAAARPEPGPARGRSRRRGLGPAVLPDRAAARGTGRAATAVDPGCLCGRGAEEAGEGPAPPAAASREGPGTRGRAGGRGRAGSGTRAGD

SEQ ID NO: 219 - protein, 1025 aa, Homo sapiens
MAGTYSSTLKTLEDLTLDSGYGAGDSCRSLSLSSSKSNSQALNSSAQQHRGAAWWCYSGSMNSRHNSWDTVNTVLPEDPEVADLFSRCPRLPELEEFPWTEGDVARVLRKGAGGRRLPQFSAEAVRRLAGLLRRALIRVAREAQRLSVLHAKCTRFEVQSAVRLVHSWALAESCALAAVKALSLYSMSAGDGLRRGKSARCGLTFSVGRFFRWMVDTRISVRIHEYAAISLTACMENLVEEIRARVMASHSPDGGGAGGGEVSAEALEMVINNDAELWGVLQPYEHLICGKNANGVLSLPAYFSPYNGGSLGHDERADAYAQLELRTLEQSLLATCVGSISELSDLVSRAMHHMQGRHPLCPGASPARQARQPPQPITWSPDALHTLYYFLRCPQMESMENPNLDPPRMTLNNERPFMLLPPLMEWMRVAITYAEHRRSLTVDSGDIRQAARLLLPGLDCEPRQLKPEHCFSSFRRLDARAATEKFNQDLGFRMLNCGRTDLINQAIEALGPDGVNTMDDQGMTPLMYACAAGDEAMVQMLIDAGANLDIQVPSNSPRHPSIHPDSRHWTSLTFAVLHGHISVVQLLLDAGAHVEGSAVNGGEDSYAETPLQLASAAGNYELVSLLLSRGADPLLSMLEAHGMGSSLHEDMNCFSHSAAHGHRNVLRKLLTQPQQAKADVLSLEEILAEGVEESDASSQGSGSEGPVRLSRTRTKALQEAMYYSAEHGYVDITMELRALGVPWKLHIWIESLRTSFSQSRYSVVQSLLRDFSSIREEEYNEELVTEGLQLMFDILKTSKNDSVIQQLATIFTHCYGSSPIPSIPEIRKTLPARLDPHFLNNKEMSDVTFLVEGKLFYAHKVLLVTASNRFKTLMTNKSEQDGDSSKTIEISDMKYHIFQMMMQYLYYGGTESMEIPTTDILELLSAASLFQLDALQRHCEILCSQTLSMESAVNTYKYAKIHNAPELALFCEGFFLKHMKALLEQDAFRQLIYGRSSKVQGLDPLQDLQNTLAERVHSVYITSRV

SEQ ID NO: 220 - protein, 255 aa, Homo sapiens
MFHQVRRVMTILFLTMVISYFGCMKAAPMKEANIRGQGGLAYPGVRTHGTLESVNGPKAGSRGLTSLADTFEHVIEELLDEDQKVRPNEENNKDADLYTSRVMLSSQVPLEPPLLFLLEEYKNYLDAANMSMRVRRHSDPARRGELSVCDSISEWVTAADKKTAVDMSGGTVTVLEKVPVSKGQLKQYFYETKCNPMGYTKEGCRGIDKRHWNSQCRTTQSYVRALTMDSKKRIGWRFIRIDTSCVCTLTIKRGR

SEQ ID NO: 221 - protein, 1312 aa, Homo sapiens; identical to SEQ ID NO: 191

SEQ ID NO: 222 - protein, 320 aa, Homo sapiens; identical to SEQ ID NO: 176

SEQ ID NO: 223 - protein, 1609 aa, Homo sapiens
MRGSHRAAPALRPRGRLWPVLAVLAAAAAAGCAQAAMDECTDEGGRPQRCMPEFVNAAFNVTVVATNTCGTPPEEYCVQTGVTGVTKSCHLCDAGQPHLQHGAAFLTDYNNQADTTWWQSQTMLAGVQYPSSINLTLHLGKAFDITYVRLKFHTSRPESFAIYKRTREDGPWIPYQYYSGSCENTYSKANRGFIRTGGDEQQALCTDEFSDISPLTGGNVAFSTLEGRPSAYNFDNSPVLQEWVTATDIRVTLNRLNTFGDEVFNDPKVLKSYYYAISDFAVGGRCKCNGHASECMKNEFDKLVCNCKHNTYGVDCEKCLPFFNDRPWRRATAESASECLPCDCNGRSQECYFDPELYRSTGHGGHCTNCQDNTDGAHCERCRENFFRLGNNEACSSCHCSPVGSLSTQCDSYGRCSCKPGVMGDKCDRCQPGFHSLTEAGCRPCSCDPSGSIDECNIETGRCVCKDNVEGFNCERCKPGFFNLESSNPRGCTPCFCFGHSSVCTNAVGYSVYSISSTFQIDEDGWRAEQRDGSEASLEWSSERQDIAVISDSYFPRYFIAPAKFLGKQVLSYGQNLSFSFRVDRRDTRLSAEDLVLEGAGLRVSVPLIAQGNSYPSETTVKYVFRLHEATDYPWRPALTPFEFQKLLNNLTSIKIRGTYSERSAGYLDDVTLASARPGPGVPATWVESCTCPVGYGGQFCEMCLSGYRRETPNLGPYSPCVLCACNGHSETCDPETGVCNCRDNTAGPHCEKCSDGYYGDSTAGTSSDCQPCPCPGGSSCAVVPKTKEVVCTNCPTGTTGKRCELCDDGYFGDPLGRNGPVRLCRLCQCSDNIDPNAVGNCNRLTGECLKCIYNTAGFYCDRCKDGFFGNPLAPNPADKCKACNCNLYGTMKQQSSCNPVTGQCECLPHVTGQDCGACDPGFYNLQSGQGCERCDCHALGSTNGQCDIRTGQCECQPGITGQHCERCEVNHFGFGPEGCKPCDCHPEGSLSLQCKDDGRCECREGFVGNRCDQCEENYFYNRSWPGCQECPACYRLVKDKVADHRVKLQELESLIANLGTGDEMVTDQAFEDRLKEAEREVMDLLREAQDVKDVDQNLMDRLQRVNNTLSSQISRLQNIRNTIEETGNLAEQARAHVENTERLIEIASRELEKAKVAAANVSVTQPESTGDPNNMTLLAEEARKLAERHKQEADDIVRVAKTANDTSTEAYNLLLRTLAGENQTAFEIEELNRKYEQAKNISQDLEKQAARVHEEAKRAGDKAVEIYASVAQLSPLDSETLENEANNIKMEAENLEQLIDQKLKDYEDLREDMRGKELEVKNLLEKGKTEQQTADQLLARADAAKALAEEAAKKGRDTLQEANDILNNLKDFDRRVNDNKTAAEEALRKIPAINQTITEANEKTREAQQALGSAAADATEAKNKAHEAERIASAVQKNATSTKAEAERTFAEVTDLDNEVNNMLKQLQEAEKELKRKQDDADQDMMMAGMASQAAQEAEINARKAKNSVTSLLSIINDLLEQLGQLDTVDLNKLNEIEGTLNKAKDEMKVSDLDRKVSDLENEAKKQEAAIMDYNRDIEEIMKDIRNLEDIRKTLPSGCFNTPSIEKP

SEQ ID NO: 224 - protein, 2843 aa, Homo sapiens; identical to SEQ ID NO: 192

SEQ ID NO: 225 - protein, 479 aa, Homo sapiens
MARAAALLPSRSPPTPLLWPLLLLLLLETGAQDVRVQVLPEVRGQLGGTVELPCHLLPPVPGLYISLVTWQRPDAPANHQNVAAFHPKMGPSFPSPKPGSERLSFVSAKQSTGQDTEAELQDATLALHGLTVEDEGNYTCEFATFPKGSVRGMTWLRVIAKPKNQAEAQKVTFSQDPTTVALCISKEGRPPARISWLSSLDWEAKETQVSGTLAGTVTVTSRFTLVPSGRADGVTVTCKVEHESFEEPALIPVTLSVRYPPEVSISGYDDNWYLGRTDATLSCDVRSNPEPTGYDWSTTSGTFPTSAVAQGSQLVIHAVDSLFNTTFVCTVTNAVGMGRAEQVIFVRETPRASPRDVGPLVWGAVGGTLLVLLLLAGGSLAFILLRVRRRRKSPGGAGGGASGDGGFYDPKAQVLGNGDPVFWTPVVPGPMEPDGKDEEEEEEEEKAEKGLMLPPPPALEDDMESQLDGSLISRRAVYV

SEQ ID NO: 226 - protein, 1221 aa, Homo sapiens; identical to SEQ ID NO: 197

SEQ ID NO: 227 - protein, 244 aa, Homo sapiens; identical to SEQ ID NO: 179

SEQ ID NO: 228 - protein, 880 aa, Homo sapiens
MSRGGSYPHLLWDVRKRSLGLEDPSRLRSRYLGRREFIQRLKLEATLNVHDGCVNTICWNDTGEYILSGSDDTKLVISNPYSRKVLTTIRSGHRANIFSAKFLPCTNDKQIVSCSGDGVIFYTNVEQDAETNRQCQFTCHYGTTYEIMTVPNDPYTFLSCGEDGTVRWFDTRIKTSCTKEDCKDDILINCRRAATSVAICPPIPYYLAVGCSDSSVRIYDRRMLGTRATGNYAGRGTTGMVARFIPSHLNNKSCRVTSLCYSEDGQEILVSYSSDYIYLFDPKDDTARELKTPSAEERREELRQPPVKRLRLRGDWSDTGPRARPESERERDGEQSPNVSLMQRMSDMLSRWFEEASEVAQSNRGRGRSRPRGGTSQSDISTLPTVPSSPDLEVSETAMEVDTPAEQFLQPSTSSTMSAQAHSTSSPTESPHSTPLLSSPDSEQRQSVEASGHHTHHQSDSPSSVVNKQLGSMSLDEQQDNNNEKLSPKPGTGEPVLSLHYSTEGTTTSTIKLNFTDEWSSIASSSRGIGSHCKSEGQEESFVPQSSVQPPEGDSETKAPEESSEDVTKYQEGVSAENPVENHINITQSDKFTAKPLDSNSGERNDLNLDRSCGVPEESASSEKAKEPETSDQTSTESATNENNTNPEPQFQTEATGPSAHEETSTRDSALQDTDDSDDDPVLIPGARYRAGPGDRRSAVARIQEFFRRRKERKEMEELDTLNIRRPLVKMVYKGHRNSRTMIKEANFWGANFVMSGSDCGHIFIWDRHTAEHLMLLEADNHVVNCLQPHPFDPILASSGIDYDIKIWSPLEESRIFNRKLADEVITRNELMLEETRNTITVPASFMLRMLASLNHIRADRLEGDRSEGSGQENENEDEE

SEQ ID NO: 229 - protein, 316 aa, Homo sapiens; identical to SEQ ID NO: 204

SEQ ID NO: 230 - protein, 462 aa, Homo sapiens
MDKDSQGLLDSSLMASGTASRSEDEESLAGQKRASSQALGTIPKRRSSSRFIKRKKFDDELVESSLAKSSTRAKGASGVEPGRCSGSEPSSSEKKKVSKAPSTPVPPSPAPAPGLTKRVKKSKQPLQVTKDLGRWKPADDLLLINAVLQTNDLTSVHLGVKFSCRFTLREVQERWYALLYDPVISKLACQAMRQLHPEAIAAIQSKALFSKAEEQLLSKVGSTSQPTLETFQDLLHRHPDAFYLARTAKALQAHWQLMKQYYLLEDQTVQPLPKGDQVLNFSDAEDLIDDSKLKDMRDEVLEHELMVADRRQKREIRQLEQELHKWQVLVDSITGMSSPDFDNQTLAVLRGRMVRYLMRSREITLGRATKDNQIDVDLSLEGPAWKISRKQGVIKLKNNGDFFIANEGRRPIYIDGRPVLCGSKWRLSNNSVVEIASLRFVFLINQDLIALIRAEAAKITPQ

SEQ ID NO: 231 - protein, 224 aa, Homo sapiens; identical to SEQ ID NO: 209

SEQ ID NO: 232 - protein, 732 aa, Homo sapiens
MPEETQTQDQPMEEEEVETFAFQAEIAQLMSLIINTFYSNKEIFLRELISNSSDALDKIRYESLTDPSKLDSGKELHINLIPNKQDRTLTIVDTGIGMTKADLINNLGTIAKSGTKAFMEALQAGADISMIGQFGVGFYSAYLVAEKVTVITKHNDDEQYAWESSAGGSFTVRTDTGEPMGRGTKVILHLKEDQTEYLEERRIKEIVKKHSQFIGYPITLFVEKERDKEVSDDEAEEKEDKEEEKEKEEKESEDKPEIEDVGSDEEEEKKDGDKKKKKKIKEKYIDQEELNKTKPIWTRNPDDITNEEYGEFYKSLTNDWEDHLAVKHFSVEGQLEFRALLFVPRRAPFDLFENRKKKNNIKLYVRRVFIMDNCEELIPEYLNFIRGVVDSEDLPLNISREMLQQSKILKVIRKNLVKKCLELFTELAEDKENYKKFYEQFSKNIKLGIHEDSQNRKKLSELLRYYTSASGDEMVSLKDYCTRMKENQKHIYYITGETKDQVANSAFVERLRKHGLEVIYMIEPIDEYCVQQLKEFEGKTLVSVTKEGLELPEDEEEKKKQEEKKTKFENLCKIMKDILEKKVEKVVVSNRLVTSPCCIVTSTYGWTANMERIMKAQALRDNSTMGYMAAKKHLEINPDHSIIETLRQKAEADKNDKSVKDLVILLYETALLSSGFSLEDPQTHANRIYRMIKLGLGIDEDDPTADDTSAAVTEEMPPLEGDDDTSRMEEVD

SEQ ID NO: 233 - protein, 329 aa, Homo sapiens; identical to SEQ ID NO: 184

SEQ ID NO: 234 - protein, 190 aa, Homo sapiens
MATHHTLWMGLALLGVLGDLQAAPEAQVSVQPNFQQDKFLGRWFSAGLASNSSWLREKKAALSMCKSVVAPATDGGLNLTSTFLRKNQCETRTMLLQPAGSLGSYSYRSPHWGSTYSVSVVETDYDQYALLYSQGSKGPGEDFRMATLYSRTQTPRAELKEKFTAFCKAQGFTEDTIVFLPQTDKCMTEQ

SEQ ID NO: 235 - protein, 677 aa, Homo sapiens
MDDPDCDSTWEEDEEDAEDAEDEDCEDGEAAGARDADAGDEDEESEEPRAARPSSFQSRMTGSRNWRATRDMCRYRHNYPDLVERDCNGDTPNLSFYRNEIRFLPNGCFIEDILQNWTDNYDLLEDNHSYIQWLFPLREPGVNWHAKPLTLREVEVFKSSQEIQERLVRAYELMLGFYGIRLEDRGTGTVGRAQNYQKRFQNLNWRSHNNLRITRILKSLGELGLEHFQAPLVRFFLEETLVRRELPGVRQSALDYFMFAVRCRHQRRQLVHFAWEHFRPRCKFVWGPQDKLRRFKPSSLPHPLEGSRKVEEEGSPGDPDHEASTQGRTCGPEHSKGGGRVDEGPQPRSVEPQDAGPLERSQGDEAGGHGEDRPEPLSPKESKKRKLELSRREQPPTEPGPQSASEVEKIALNLEGCALSQGSLRTGTQEVGGQDPGEAVQPCRQPLGARVADKVRKRRKVDEGAGDSAAVASGGAQTLALAGSPAPSGHPKAGHSENGVEEDTEGRTGPKEGTPGSPSETPGPSPAGPAGDEPAESPSETPGPRPAGPAGDEPAESPSETPGPRPAGPAGDEPAESPSETPGPSPAGPTRDEPAESPSETPGPRPAGPAGDEPAESPSETPGPRPAGPAGDEPAESPSETPGPSPAGPTRDEPAKAGEAAELQDAEVESSAKSGKP

SEQ ID NO: 236 - protein, 136 aa, Homo sapiens
RSHHHHHHGRPTRPGTESVQGGPCPCPSCKRLCEGLSCPCPPCTVLAGGGGEKSGVPGAGNCPALPGCGTEESVLNRSMILLALPALQAPTTIWSRSPPGLTFRPAAALTHHACQGSSVPTESREGPPHVPACDGL

SEQ ID NO: 237 - protein, 217 aa, Homo sapiens
MRGSHHHHHHGSYLGDTIESSTHASAQAPAQQDLQGTSQPRAHRRPQAPAQQDLQGTSQPRAHRRPQAPARQDLQGTSQPRAHRRPQAPARQDLQGMSQPRAHRRPQAPARQDLQGTSQPRAHRRPQAPARQDLQGTSQPRAHRRPQAPARQDLQGMSQPRRGRQQSCRTQRWSLLPSLGSLKERSARRRLGPPVPAAGAGASGAAAGSPQALLRDP

SEQ ID NO: 238 - protein, 416 aa, Homo sapiens
MSEADGLRQRRPLRPQVVTDDDGQAPEAKDGSSFSGRVFRVTFLMLAVSLTVPLLGAMMLLESPIDPQPLSFKEPPLLLGVLHPNTKLRQAERLFENQLVGPESIAHIGDVMFTGTADGRVVKLENGEIETIARFGSGPCKTRDDEPVCGRPLGIRAGPNGTLFVADAYKGLFEVNPWKREVKLLLSSETPIEGKNMSFVNDLTVTQDGRKIYFTDSSSKWQRRDYLLLVMEGTDDGRLLEYDTVTREVKVLLDQLRFPNGVQLSPAEDFVLVAETTMARIRRVYVSGLMKGGADLFVENMPGFPDNIRPSSSGGYWVGMSTIRPNPGFSMLDFLSERPWIKRMIFKLFSQETVMKFVPRYSLVLELSDSGAFRRSLHDPDGLVATYISEVHEHDGHLYLGSFRSPFLCRLSLQAV

SEQ ID NO: 239 - protein, 4374 aa, Homo sapiens
MKVDRTKLKKTPTEAPADCRALIDKLKVCNDEQLLLELQQIKTWNIGKCELYHWVDLLDRFDGILADAGQTVENMSWMLVCDRPEREQLKMLLLAVLNFTALLIEYSFSRHLYSSIEHLTTLLASSDMQVVLAVLNLLYVFSKRSNYITRLGSDKRTPLLTRLQHLAESWGGKENGFGLAECCRDLHMMKYPPSATTLHFEFYADPGAEVKIEKRTTSNTLHYIHIEQLDKISESPSEIMESLTKMYSIPKDKQMLLFTHIRLAHGFSNHRKRLQAVQARLHAISILVYSNALQESANSILYNGLIEELVDVLQITDKQLMEIKAASLRTLTSIVHLERTPKLSSIIDCTGTASYHGFLPVLVRNCIQAMIDPSMDPYPHQFATALFSFLYHLASYDAGGEALVSCGMMEALLKVIKFLGDEQDQITFVTRAVRVVDLITNLDMAAFQSHSGLSIFIYRLEHEVDLCRKECPFVIKPKIQRPNTTQEGEEMETDMDGVQCIPQRAALLKSMLNFLKKAIQDPAFSDGIRHVMDGSLPTSLKHIISNAEYYGPSLFLLATEVVTVFVFQEPSLLSSLQDNGLTDVMLHALLIKDVPATREVLGSLPNVFSALCLNARGLQSFVQCQPFERLFKVLLSPDYLPAMRRRRSSDPLGDTASNLGSAVDELMRHQPTLKTDATTAIIKLLEEICNLGRDPKYICQKPSIQKADGTATAPPPRSNHAAEEASSEDEEEEEVQAMQSFNSTQQNETEPNQQVVGTEERIPIPLMDYILNVMKFVESILSNNTTDDHCQEFVNQKGLLPLVTILGLPNLPIDFPTSAACQAVAGVCKSILTLSHEPKVLQEGLLQLDSILSSLEPLHRPIESPGGSVLLRELACAGNVADATLSAQATPLLHALTAAHAYIMMFVHTCRVGQSEIRSISVNQWGSQLGLSVLSKLSQLYCSLVWESTVLLSLCTPNSLPSGCEFGQADMQKLVPKDEKAGTTQGGKRSDGEQDGAAGSMDASTQGLLEGIGLDGDTLAPMETDEPTASDSKGKSKITPAMAARIKQIKPLLSASSRLGRALAELFGLLVKLCVGSPVRQRRSHHAASTTTAPTPAARSTASALTKLLTKGLSWQPPPYTPTPRFRLTFFICSVGFTSPMLFDERKYPYHLMLQKFLCSGGHNALFETFNWALSMGGKVPVSEGLEHSDLPDGTGEFLDAWLMLVEKMVNPTTVLESPHSLPAKLPGGVQNFPQFSALRFLVVTQKAAFTCIKNLWNRKPLKVYGGRMAESMLAILCHILRGEPVIRERLSKEKEGSRGEEDTGQEEGGSRREPQVNQQQLQQLMDMGFTREHAMEALLNTSTMEQATEYLLTHPPPIMGGVVRDLSMSEEDQMMRAIAMSLGQDIPMDQRAESPEEVACRKEEEERKAREKQEEEEAKCLEKFQDADPLEQDELHTFTDTMLPGCFHLLDELPDTVYRVCDLIMTAIKRNGADYRDMILKQVVNQVWEAADVLIKAALPLTTSDTKTVSEWISQMATLPQASNLATRILLLTLLFEELKLPCAWVVESSGILNVLIKLLEVVQPCLQAAKEQKEVQTPKWITPVLLLIDFYEKTAISSKRRAQMTKYLQSNSNNWRWFDDRSGRWCSYSASNNSTIDSAWKSGETSVRFTAGRRRYTVQFTTMVQVNEETGNRRPVMLTLLRVPRLNKNSKNSNGQELEKTLEESKEMDIKRKENKGNDTPLALESTNTEKETSLEETKIGEILIQGLTEDMVTVLIRACVSMLGVPVDPDTLHATLRLCLRLTRDHKYAMMFAELKSTRMILNLTQSSGFNGFTPLVTLLLRHIIEDPCTLRHTMEKVVRSAATSGAGSTTSGVVSGSLGSREINYILRVLGPAACRNPDIFTEVANCCIRIALPAPRGSGTASDDEFENLRIKGPNAVQLVKTTPLKPSPLPVIPDTIKEVIYDMLNALAAYHAPEEADKSDPKPGVMTQEVGQLLQDMGDDVYQQYRSLTRQSSDFDTQSGFSINSQVFAADGASTETSASGTSQGEASTPEESRDGKKDKEGDRASEEGKQKGKGSKPLMPTSTILRLLAELVRSYVGIATLIANYSYTVGQSELIKEDCSVLAFVLDHLLPHTQNAEDKDTPALARLFLASLAAAGSGTDAQVALVNEVKAALGRALAMAESTEKHARLQAVMCIISTIMESCPSTSSFYSSATAKTQHNGMNNIIRLFLKKGLVNDLARVPHSLDLSSPNMANTVNAALKPLETLSRIVNQPSSLFGSKSASSKNKSEQDAQGASQDSSSNQQDPGEPGEAEVQEEDHDVTQTEVADGDIMDGEAETDSVVIAGQPEVLSSQEMQVENELEDLIDELLERDGGSGNSTIIVSRSGEDESQEDVLMDEAPSNLSQASTLQANREDSMNILDPEDEEEHTQEEDSSGSNEDEDDSQDEEEEEEEDEEDDQEDDEGEEGDEDDDDDGSEMELDEDYPDMNASPLVRFERFDREDDLIIEFDNMFSSATDIPPSPGNIPTTHPLMVRHADHSSLTLGSGSSTTRLTQGIGRSQRTLRQLTANTGHTIHVHYPGNRQPNPPLILQRLLGPSAAADILQLSSSLPLQSRGRARLLVGNDDVHIIARSDDELLDDFFHDQSTATSQAGTLSSIPTALTRWTEECKVLDAESMHDCVSVVKVSIVNHLEFLRDEELEERREKRRKQLAEEETKITDKGKEDKENRDQSAQCTASKSNDSTEQNLSDGTPMPDSYPTTPSSTDAATSESKETLGTLQSSQQQPTLPTPPALGEVPQELQSPAGEGGSSTQLLMPVEPEELGPTRPSGEAETTQMELSPAPTITSLSPERAEDSDALTAVSSQLEGSPMDTSSLASCTLEEAVGDTSAAGSSEQPRAGSSTPGDAPPAVAEVQGRSDGSGESAQPPEDSSPPASSESSSTRDSAVAISGADSRGILEEPLPSTSSEEEDPLAGISLPEGVDPSFLAALPDDIRREVLQNQLGIRPPTRTAPSTNSSAPAVVGNPGVTEVSPEFLAALPPAIQEEVLAQQRAEQQRRELAQNASSDTPMDPVTFIQTLPSDLRRSVLEDMEDSVLAVMPPDIAAEAQALRREQEARQRQLMHERLFGHSSTSALSAILRSPAFTSRLSGNRGVQYTRLAVQRGGTFQMGGSSSHNRPSGSNVDTLLRLRGRLLLDHEALSCLLVLLFVDEPKLNTSRLHRVLRNLCYHAQTRHWVIRSLLSILQRSSESELCIETPKLTTSEEKGKKSSKSCGSSSHENRPLDLLHKMESKSSNQLSWLSVSMDAALGCRTNIFQIQRSGGRKHTEKHASGGSTVHIHPQAAPVVCRHVLDTLIQLAKVFPSHFTQQRTKETNCESDRERGNKACSPCSSQSSSSGICTDFWDLLVKLDNMNVSRKGKNSVKSVPVSAGGEGETSPYSLEASPLGQLMNMLSHPVIRRSSLLTEKLLRLLSLISIALPENKVSEAQANSGSGASSTTTATSTTSTTTTTAASTTPTPPTAPTPVTSAPALVAATAISTIVVAASTTVTTPTTATTTVSISPTTKGSKSPAKVSDGGSSSTDFKMVSSGLTENQLQLSVEVLTSHSCSEEGLEDAANVLLQLSRGDSGTRDTVLKLLLNGARHLGYTLCKQIGTLLAELREYNLEQQRRAQCETLSPDGLPEEQPQTTKLKGKMQSRFDMAENVVIVASQKRPLGGRELQLPSMSMLTSKTSTQKFFLRVLQVIIQLRDDTRRANKKAKQTGRLGSSGLGSASSIQAAVRQLEAEADAIIQMVREGQRARRQQQAATSESSQSEASVRREESPMDVDQPSPSAQDTQSIASDGTPQGEKEKEERPPELPLLSEQLSLDELWDMLGECLKELEESHDQHAVLVLQPAVEAFFLVHATERESKPPVRDTRESQLAHIKDEPPPLSPAPLTPATPSSLDPFFSREPSSMHISSSLPPDTQKFLRFAETHRTVLNQILRQSTTHLADGPFAVLVDYIRVLDFDVKRKYFRQELERLDEGLRKEDMAVHVRRDHVFEDSYRELHRKSPEEMKNRLYIVFEGEEGQDAGGLLREWYMIISREMFNPMYALFRTSPGDRVTYTINPSSHCNPNHLSYFKFVGRIVAKAVYDNRLLECYFTRSFYKHILGKSVRYTDMESEDYHFYQGLVYLLENDVSTLGYDLTFSTEVQEFGVCEVRDLKPNGANILVTEENKKEYVHLVCQMRMTGAIRKQLAAFLEGFYEIIPKRLISIFTEQELELLISGLPTIDIDDLKSNTEYHKYQSNSIQIQWFWRALRSFDQADRAKFLQFVTGTSKVPLQGFAALEGMNGIQKFQIHRDDRSTDRLPSAHTCFNQLDLPAYESFEKLRHMLLLAIQECSEGFGLA

SEQ ID NO: 240 - protein, 191 aa, Homo sapiens; identical to SEQ ID NO: 177

SEQ ID NO: 241 - protein, 1020 aa, Homo sapiens
MMSFGGADALLGAPFAPLHGGGSLHYALARKGGAGGTRSAAGSSSGFHSWTRTSVSSVSASPSRFRGAGAASSTDSLDTLSNGPEGCMVAVATSRSEKEQLQALNDRFAGYIDKVRQLEAHNRSLEGEAAALRQQQAGRSAMGELYEREVREMRGAVLRLGAARGQLRLEQEHLLEDIAHVRQRLDDEARQREEAEAAARALARFAQEAEAARVDLQKKAQALQEECGYLRRHHQEEVGELLGQIQGSGAAQAQMQAETRDALKCDVTSALREIRAQLEGHAVQSTLQSEEWFRVRLDRLSEAAKVNTDAMRSAQEEITEYRRQLQARTTELEALKSTKDSLERQRSELEDRHQADIASYQEAIQQLDAELRNTKWEMAAQLREYQDLLNVKMALDIEIAAYRKLLEGEECRIGFGPIPFSLPEGLPKIPSVSTHIKVKSEEKIKVVEKSEKETVIVEEQTEETQVTEEVTEEEEKEAKEEEGKEEEGGEEEEAEGGEEETKSPPAEEAASPEKEAKSPVKEEAKSPAEAKSPEKEEAKSPAEVKSPEKAKSPAKEEAKSPPEAKSPEKEEAKSPAEVKSPEKAKSPAKEEAKSPAEAKSPEKAKSPVKEEAKSPAEAKSPVKEEAKSPAEVKSPEKAKSPTKEEAKSPEKAKSPEKEEAKSPEKAKSPVKAEAKSPEKAKSPVKAEAKSPEKAKSPVKEEAKSPEKAKSPVKEEAKSPEKAKSPVKEEAKTPEKAKSPVKEEAKSPEKAKSPEKAKTLDVKSPEAKTPAKEEARSPADKFPEKAKSPVKEEVKSPEKAKSPLKEDAKAPEKEIPKKEEVKSPVKEEEKPQEVKVKEPPKKAEEEKAPATPKTEEKKDSKKEEAPKKEAPKPKVEEKKEPAVEKPKESKVEAKKEEAEDKKKVPTPEKEAPAKVEVKEDAKPKEKTEVAKKEPDDAKAKEPSKPAEKKEAAPEKKDTKEEKAKKPEEKPKTEAKAKEDDKTLSKEPSKPKAEKAEKSSSTDQKDSKPPEKATEDKAAKGK

SEQ ID NO: 242 - protein, 3097 aa, Homo sapiens
MSGSSGGAAAPAASSGPAAAASAAGSGCGGGAGEGAEEAAKDLADIAAFFRSGFRKNDEMKAMDVLPILKEKVAYLSGGRDKRGGPILTFPARSNHDRIRQEDLRRLISYLACIPSEEVCKRGFTVIVDMRGSKWDSIKPLLKILQESFPCCIHVALIIKPDNFWQKQRTNFGSSKFEFETNMVSLEGLTKVVDPSQLTPEFDGCLEYNHEEWIEIRVAFEDYISNATHMLSRLEELQDILAKKELPQDLEGARNMIEEHSQLKKKVIKAPIEDLDLEGQKLLQRIQSSESFPKKNSGSGNADLQNLLPKVSTMLDRLHSTRQHLHQMWHVRKLKLDQCFQLRLFEQDAEKMFDWITHNKGLFLNSYTEIGTSHPHAMELQTQHNHFAMNCMNVYVNINRIMSVANRLVESGHYASQQIRQIASQLEQEWKAFAAALDERSTLLDMSSIFHQKAEKYMSNVDSWCKACGEVDLPSELQDLEDAIHHHQGIYEHITLAYSEVSQDGKSLLDKLQRPLTPGSSDSLTASANYSKAVHHVLDVIHEVLHHQRQLENIWQHRKVRLHQRLQLCVFQQDVQQVLDWIENHGEAFLSKHTGVGKSLHRARALQKRHEDFEEVAQNTYTNADKLLEAAEQLAQTGECDPEEIYQAAHQLEDRIQDFVRRVEQRKILLDMSVSFHTHVKELWTWLEELQKELLDDVYAESVEAVQDLIKRFGQQQQTTLQVTVNVIKEGEDLIQQLRDSAISSNKTPHNSSINHIETVLQQLDEAQSQMEELFQERKIKLELFLQLRIFERDAIDIISDLESWNDELSQQMNDFDTEDLTIAEQRLQHHADKALTMNNLTFDVIHQGQDLLQYVNEVQASGVELLCDRDVDMATRVQDLLEFLHEKQQELDLAAEQHRKHLEQCVQLRHLQAEVKQVLGWIRNGESMLNAGLITASSLQEAEQLQREHEQFQHAIEKTHQSALQVQQKAEAMLQANHYDMDMIRDCAEKVASHWQQLMLKMEDRLKLVNASVAFYKTSEQVCSVLESLEQEYKREEDWCGGADKLGPNSETDHVTPMISKHLEQKEAFLKACTLARRNADVFLKYLHRNSVNMPGMVTHIKAPEQQVKNILNELFQRENRVLHYWTMRKRRLDQCQQYVVFERSAKQALEWIHDNGEFYLSTHTSTGSSIQHTQELLKEHEEFQITAKQTKERVKLLIQLADGFCEKGHAHAAEIKKCVTAVDKRYRDFSLRMEKYRTSLEKALGISSDSNKSSKSLQLDIIPASIPGSEVKLRDAAHELNEEKRKSARRKEFIMAELIQTEKAYVRDLRECMDTYLWEMTSGVEEIPPGIVNKELIIFGNMQEIYEFHNNIFLKELEKYEQLPEDVGHCFVTWADKFQMYVTYCKNKPDSTQLILEHAGSYFDEIQQRHGLANSISSYLIKPVQRITKYQLLLKELLTCCEEGKGEIKDGLEVMLSVPKRANDAMHLSMLEGFDENIESQGELILQESFQVWDPKTLIRKGRERHLFLFEMSLVFSKEVKDSSGRSKYLYKSKLFTSELGVTEHVEGDPCKFALWVGRTPTSDNKIVLKASSIENKQDWIKHIREVIQERTIHLKGALKEPIHIPKTAPATRQKGRRDGEDLDSQGDGSSQPDTISIASRTSQNTLDSDKLSGGCELTVVIHDFTACNSNELTIRRGQTVEVLERPHDKPDWCLVRTTDRSPAAEGLVPCGSLCIAHSRSSMEMEGIFNHKDSLSVSSNDASPPASVASLQPHMIGAQSSPGPKRPGNTLRKWLTSPVRRLSSGKADGHVKKLAHKHKKSREVRKSADAGSQKDSDDSAATPQDETVEERGRNEGLSSGTLSKSSSSGMQSCGEEEGEEGADAVPLPPPMAIQQHSLLQPDSQDDKASSRLLVRPTSSETPSAAELVSAIEELVKSKMALEDRPSSLLVDQGDSSSPSFNPSDNSLLSSSSPIDEMEERKSSSLKRRHYVLQELVETERDYVRDLGYVVEGYMALMKEDGVPDDMKGKDKIVFGNIHQIYDWHRDFFLGELEKCLEDPEKLGSLFVKHERRLHMYIAYCQNKPKSEHIVSEYIDTFFEDLKQRLGHRLQLTDLLIKPVQRIMKYQLLLKDFLKYSKKASLDTSELERAVEVMCIVPRRCNDMMNVGRLQGFDGKIVAQGKLLLQDTFLVTDQDAGLLPRCRERRIFLFEQIVIFSEPLDKKKGFSMPGFLFKNSIKVSCLCLEENVENDPCKFALTSRTGDVVETFILHSSSPSVRQTWIHEINQILENQRNFLNALTSPIEYQRNHSGGGGGGGSGGSGGGGGSGGGGAPSGGSGHSGGPSSCGGAPSTSRSRPSRIPQPVRHHPPVLVSSAASSQAEADKMSGTSTPGPSLPPPGAAPEAGPSAPSRRPPGADAEGSEREAEPIPKMKVLESPRKGAANASGSSPDAPAKDARASLGTLPLGKPRAGAASPLNSPLSSAVPSLGKEPFPPSSPLQKGGSFWSSIPASPASRPGSFTFPGDSDSLQRQTPRHAAPGKDTDRMSTCSSASEQSVQSTQSNGSESSSSSNISTMLVTHDYTAVKEDEINVYQGEVVQILASNQQNMFLVFRAATDQCPAAEGWIPGFVLGHTSAVIVENPDGTLKKSTSWHTALRLRKKSEKKDKDGKREGKLENGYRKSREGLSNKVSVKLLNPNYIYDVPPEFVIPLSEVTCETGETVVLRCRVCGRPKASITWKGPEHNTLNNDGHYSISYSDLGEATLKIVGVTTEDDGIYTCIAVNDMGSASSSASLRVLGPGMDGIMVTWKDNFDSFYSEVAELGRGRFSVVKKCDQKGTKRAVATKFVNKKLMKRDQVTHELGILQSLQHPLLVGLLDTFETPTSYILVLEMADQGRLLDCVVRWGSLTEGKIRAHLGEVLEAVRYLHNCRIAHLDLKPENILVDESLAKPTIKLADFGDAVQLNTTYYIHQLLGNPEFAAPEIILGNPVSLTSDTWSVGVLTYVLLSGVSPFLDDSVEETCLNICRLDFSFPDDYFKGVSQKAKEFVCFLLQEDPAKRPSAALALQEQWLQAGNGRSTGVLDTSRLTSFIERRKHQNDVRPIRSIKNFLQSRLLPRV

SEQ ID NO: 243 - protein, 499 aa, Homo sapiens
MELSEPIVENGETEMSPEESWEHKEEISEAEPGGGSLGDGRPPEESAHEMMEEEEEIPKPKSVVAPPGAPKKEHVNVVFIGHVDAGKSTIGGQIMYLTGMVDKRTLEKYEREAKEKNRETWYLSWALDTNQEERDKGKTVEVGRAYFETEKKHFTILDAPGHKSFVPNMIGGASQADLAVLVISARKGEFETGFEKGGQTREHAMLAKTAGVKHLIVLINKMDDPTVNWSNERYEECKEKLVPFLKKVGFNPKKDIHFMPCSGLTGANLKEQSDFCPWYIGLPFIPYLDNLPNFNRSVDGPIRLPIVDKYKDMGTVVLGKLESGSICKGQQLVMMPNKHNVEVLGILSDDVETDTVAPGENLKIRLKGIEEEEILPGFILCDPNNLCHSGRTFDAQIVIIEHKSIICPGYNAVLHIHTCIEEVEITALICLVDKKSGEKSKTRPRFVKQDQVCIARLRTAGTICLETFKDFPQMGRFTLRDEGKTIAIGKVLKLVPEKD

SEQ ID NO: 244 - protein, 467 aa, Homo sapiens; identical to SEQ ID NO: 178

SEQ ID NO: 245 - protein, 335 aa, Homo sapiens
MAAGAAEAAVAAVEEVGSAGQFEELLRLKAKSLLVVHFWAPWAPQCAQMNEVMAELAKELPQVSFVKLEAEGVPEVSEKYEISSVPTFLFFKNSQKIDRLDGAHAPELTKKVQRHASSGSFLPSANEHLKEDLNLRLKKLTHAAPCMLFMKGTPQEPRCGFSKQMVEILHKHNIQFSSFDIFSDEEVRQGLKAYSSWPTYPQLYVSGELIGGLDIIKELEASEELDTICPKAPKLEERLKVLTNKASVMLFMKGNKQEAKCGFSKQILEILNSTGVEYETFDILEDEEVRQGLKAYSNWPTYPQLYVKGELVGGLDIVKELKENGELLPILRGEN

SEQ ID NO: 246 - protein, 335 aa, Homo sapiens
MAAAAAQGGGGGEPRRTEGVGPGVPGEVEMVKGQPFDVGPRYTQLQYIGEGAYGMVSSAYDHVRKTRVAIKKISPFEHQTYCQRTLREIQILLRFRHENVIGIRDILRASTLEAMRDVYIVQDLMETDLYKLLKSQQLSNDHICYFLYQILRGLKYIHSANVLHRDLKPSNLLINTTCDLKICDFGLARIADPEHDHTGFLTEYVATRWYRAPEIMLNSKGYTKSIDIWSVGCILAEMLSNRPIFPGKHYLDQLNHILALDLLDRMLTFNPNKRITVEEALAHPYLEQYYDPTDEPVAEEPFTFAMELDDLPKERLKELIFQETARFQPGVLEAP

SEQ ID NO: 247 - protein, 1114 aa, Homo sapiens
MSQTQDYECRSHNVDLPESRIPGSNTRLEWVEIIEPRTRERMYANLVTGECVWDPPAGVRIKRTSENQWWELFDPNTSRFYYYNASTQRTVWHRPQGCDIIPLAKLQTLKQNTESPRASAESSPGRGSSVSREGSTSSSLEPEPDTEKAQELPARAGRPAAFGTVKEDSGSSSPPGVFLEKDYEIYRDYSADGQLLHYRTSSLRWNSGAKERMLIKVADREPSFLAAQGNGYAPDGPPGVRSRRPSGSQHSPSLQTFAPEADGTIFFPERRPSPFLKRAELPGSSSPLLAQPRKPSGDSQPSSPRYGYEPPLYEEPPVEYQAPIYDEPPMDVQFEAGGGYQAGSPQRSPGRKPRPFLQPNKQGPPSPCQQLVLTKQKCPERFLSLEYSPAGKEYVRQLVYVEQAGSSPKLRAGPRHKYAPNPGGGSYSLQPSPCLLRDQRLGVKSGDYSTMEGPELRHSQPPTPLPQAQEDAMSWSSQQDTLSSTGYSPGTRKRKSRKPSLCQATSATPTEGPGDLLVEQPLAEEQPPCGTSLAPVKRAEGEAEGARGAAEPFLAQARLAWEAQQAHFHMKQRSSWDSQQDGSGYESDGALPLPMPGPVVRAFSEDEALAQQENRHWRRGTFEKLGFPQILLEKSVSVQTNLASPEPYLHPSQSEDLAACAQFESSRQSRSGVPSSSCVFPTFTLRKPSSETDIENWASKHFNKHTQGLFRRKVSIANMLAWSSESIKKPMIVTSDRHVKKEACELFKLIQMYMGDRRAKADPLHVALEVATKGWSVQGLRDELYIQLCRQTTENFRLESLARGWELMAICLAFFPPTPKFHSYLEGYIYRHMDPVNDTKVTQHIKELLERNTKKKSKLRKKPKPYVEEPDGVAISTYAKYCYHKLQKAALTGAKKGLKKPNVEEIRHAKNAVFSPSMFGSALQEVMGMQRERYPERQLPWVQTRLSEEVLALNGDQTEGIFRVPGDIDEVNALKLQVDQWKVPTGLEDPHVPASLLKLWYRELEEPLIPHEFYEQCIAHYDSPEAAVAVVHALPRINRMVLCYLIRFLQVFVQPANVAVTKMDVSNLAMVMAPNCLRCQSDDPRVIFENTRKEMSFLRVLIQHLDTSFMEGVL

SEQ ID NO: 248 - protein, 200 aa, Homo sapiens
MAFTEHSPLTPHRRDLCSRSIWLARKIRSDLTALTESYVKHQGLNKNINLDSADGMPVASTDQWSELTEAERLQENLQAYRTFHVLLARLLEDQQVHFTPTEGDFHQAIHTLLLQVAAFAYQIEELMILLEYKIPRNEADGMPINVGDGGLFEKKLWGLKVLQELSQWTVRSIHDLRFISSHQTGIPARGSHYIANNKKM

SEQ ID NO: 249 - protein, 466 aa, Homo sapiens
MTLKASEGESGGSMHTALSDLYLEHLLQKRSRPEAVSHPLNTVTEDMYTNGSPAPGSPAQVKGQEVRKVRLIQFEKVTEEPMGITLKLNEKQSCTVARILHGGMIHRQGSLHVGDEILEINGTNVTNHSVDQLQKAMKETKGMISLKVIPNQQSRLPALQMFMRAQFDYDPKKDNLIPCKEAGLKFATGDIIQIINKDDSNWWQGRVEGSSKESAGLIPSPELQEWRVASMAQSAPSEAPSCSPFGKKKKYKDKYLAKHSSIFDQLDVVSYEEVVRLPAFKRKTLVLIGASGVGRSHIKNALLSQNPEKFVYPVPYTTRPPRKSEEDGKEYHFISTEEMTRNISANEFLEFGSYQGNMFGTKFETVHQIHKQNKIAILDIEPQTLKIVRTAELSPFIVFIAPTDQGTQTEALQQLQKDSEAIRSQYAHYFDLSLVNNGVDETLKKLQEAFDQACSSPQWVPVSWVY

SEQ ID NO: 250 - protein, 1169 aa, Homo sapiens
MARQPPPPWVHAAFLLCLLSLGGAIEIPMDLTQPPTITKQSAKDHIVDPRDNILIECEAKGNPAPSFHWTRNSRFFNIAKDPRVSMRRRSGTLVIDFRSGGRPEEYEGEYQCFARNKFGTALSNRIRLQVSKSPLWPKENLDPVVVQEGAPLTLQCNPPPGLPSPVIFWMSSSMEPITQDKRVSQGHNGDLYFSNVMLQDMQTDYSCNARFHFTHTIQQKNPFTLKVLTNHPYNDSSLRNHPDMYSARGVAERTPSFMYPQGTASSQMVLRGMDLLLECIASGVPTPDIAWYKKGGDLPSDKAKFENFNKALRITNVSEEDSGEYFCLASNKMGSIRHTISVRVKAAPYWLDEPKNLILAPGEDGRLVCRANGNPKPTVQWMVNGEPLQSAPPNPNREVAGDTIIFRDTQISSRAVYQCNTSNEHGYLLANAFVSVLDVPPRMLSPRNQLIRVILYNRTRLDCPFFGSPIPTLRWFKNGQGSNLDGGNYHVYENGSLEIKMIRKEDQGIYTCVATNILGKAENQVRLEVKDPTRIYRMPEDQVARRGTTVQLECRVKHDPSLKLTVSWLKDDEPLYIGNRMKKEDDSLTIFGVAERDQGSYTCVASTELDQDLAKAYLTVLGRPDRPRDLELTDLAERSVRLTWIPGDANNSPITDYVVQFEEDQFQPGVWHDHSKYPGSVNSAVLRLSPYVNYQFRVIAINEVGSSHPSLPSERYRTSGAPPESNPGDVKGEGTRKNNMEITWTPMNATSAFGPNLRYIVKWRRRETREAWNNVTVWGSRYVVGQTPVYVPYEIRVQAENDFGKGPEPESVIGYSGEDYPRAAPTEVKVRVMNSTAISLQWNRVYSDTVQGQLREYRAYYWRESSLLKNLWVSQKRQQASFPGDRLRGVVSRLFPYSNYKLEMVVVNGRGDGPRSETKEFTTPEGVPSAPRRFRVRQPNLETINLEWDHPEHPNGIMIGYTLKYVAFNGTKVGKQIVENFSPNQTKFTVQRTDPVSRYRFTLSARTQVGSGEAVTEESPAPPNEAYTNNQADIATQGWFIGLMCAIALLVLILLIVCFIKRSRGGKYPVREKKDVPLGPEDPKEEDGSFDYSDEDNKPLQGSQTSLDGTIKQQESDDSLVDYGEGGEGQFNEDGSFIGQYTVKKDKEETEGNESSEATSPVNAIYSLA

SEQ ID NO: 251 - protein, 646 aa, Homo sapiens
MTDNSNNQLVVRAKFNFQQTNEDELSFSKGDVIHVTRVEEGGWWEGTLNGRTGWFPSNYVREVKASEKPVSPKSGTLKSPPKGFDTTAINKSYYNVVLQNILETENEYSKELQTVLSTYLRPLQTSEKLSSANISYLMGNLEEICSFQQMLVQSLEECTKLPEAQQRVGGCFLNLMPQMKTLYLTYCANHPSAVNVLTEHSEELGEFMETKGASSPGILVLTTGLSKPFMRLDKYPTLLKELERHMEDYHTDRQDIQKSMAAFKNLSAQCQEVRKRKELELQILTEAIRNWEGDDIKTLGNVTYMSQVLIQCAGSEEKNERYLLLFPNVLLMLSASPRMSGFIYQGKLPTTGMTITKLEDSENHRNAFEISGSMIERILVSCNNQQDLQEWVEHLQKQTKVTSVGNPTIKPHSVPSHTLPSHPVTPSSKHADSKPAPLTPAYHTLPHPSHHGTPHTTINWGPLEPPKTPKPWSLSCLRPAPPLRPSAALCYKEDLSKSPKTMKKLLPKRKPERKPSDEEFASRKSTAALEEDAQILKVIEAYCTSAKTRQTLNSSSRKESAPQVLLPEEEKIIVEETKSNGQTVIEEKSLVDTVYALKDEVQELRQDNKKMKKSLEEEQRARKDLEKLVRKVLKNMNDPAWDETNL

SEQ ID NO: 252 - protein, 483 aa, Homo sapiens; identical to SEQ ID NO: 181

SEQ ID NO: 253 - protein, 685 aa, Homo sapiens
MQIFVKTLTGKTITLEVEPSDTIENVKAKIQDKEGIPPDQQRLIFAGKQLEDGRTLSDYNIQKESTLHLVLRLRGGMQIFVKTLTGKTITLEVEPSDTIENVKAKIQDKEGIPPDQQRLIFAGKQLEDGRTLSDYNIQKESTLHLVLRLRGGMQIFVKTLTGKTITLEVEPSDTIENVKAKIQDKEGIPSDQQRLIFAGKQLEDGRTLSDYNIQKESTLHLVLRLRGGMQIFVKTLTGKTITLEVEPSDTIENVKAKIQDKEGIPPDQQRLIFAGKQLEDGRTLSDYNIQKESTLHLVLRLRGGMQIFVKTLTGKTITLEVEPSDTIENVKAKIQDKEGIPPDQQRLIFAGKQLEDGRTLSDYNIQKESTLHLVLRLRGGMQIFVKTLTGKTITLEVEPSDTIENVKAKIQDKEGIPPDQQRLIFAGKQLEDGRTLSDYNIQKESTLHLVLRLRGGMQIFVKTLTGKTITLEVEPSDTIENVKAKIQDKEGIPPDQQRLIFAGKQLEDGRTLSDYNIQKESTLHLVLRLRGGMQIFVKTLTGKTITLEVEPSDTIENVKAKIQDKEGIPPDQQRLIFAGKQLEDGRTLSDYNIQKESTLHLVLRLRGGMQIFVKTLTGKTITLEVEPSDTIENVKAKIQDKEGIPPDQQRLIFAGKQLEDGRTLSDYNIQKESTLHLVLRLRGGV

SEQ ID NO: 254 - protein, 220 aa, Homo sapiens
MASATDSRYGQKESSDQNFDYMFKILIIGNSSVGKTSFLFRYADDSFTPAFVSTVGIDFKVKTIYRNDKRIKLQIWDTAGQERYRTITTAYYRGAMGFILMYDITNEESFNAVQDWSTQIKTYSWDNAQVLLVGNKCDMEDERVVSSERGRQLADHLGFEFFEASAKDNINVKQTFERLVDVICEKMSESLDTADPAVTGAKQGPQLSDQQVPPHQDCAC

SEQ ID NO: 255 - protein, 183 aa, Homo sapiens
MAAQRGMPSSAVRVLEEALGMGLTAAGDARDTADAVAAEGAYYLEQVTITEASEDDYEYEEIPDDNFSIPEGEEDLAKAIQMAQEQATDTEILERKTVLPSKHAVPEVIEDFLCNFLIKMGMTRTLDCFQSEWYELIQKGVTELRTVGNVPDVYTQIMLLENENKNLKKDLKHYKQAAEYVIF

SEQ ID NO: 256 - protein, 1005 aa, Homo sapiens; identical to SEQ ID NO: 211

SEQ ID NO: 257 - protein, 523 aa, Homo sapiens
MPSVMEKPSAGSGILSRSRAKTVPNGGQPHSEDDSSEEEHSHDSMIRVGTNYQAVIPECKPESPARYSNKELKGMLVWSPNHCVSDAKLDKYIAMAKEKHGYNIEQALGMLLWHKHDVEKSLADLANFTPFPDEWTVEDKVLFEQAFGFHGKCFQRIQQMLPDKLIPSLVKYYYSWKKTRSRTSVMDRQARRLGGRKDKEDSDELEEGRGGVSEGEPDPADPKREPLPSRPLNARPGPGKKEVQVSQYRHHPLRTRRRPPKGMYLSPEGLTAVSGSPDLANLTLRGLDSQLISLKRQVQSMKQTNSSLRQALEGGIDPLRPPEANTKFNSRWTTDEQLLAVQAIRRYGKDFGAIAEVIGNKTLTQVKTFFVSYRRRFNLEEVLQEWEAEQDGAPGAPVPMEEARRGAPLPAPALEEDDEVQITSVSTSVPRSVPPAPPPPPPPTSLSQPPPLLRPPLPTAPTLLRQPPPLQQGRFLQPRLAPNQPPPPLIRPALAAPRHSARPGPQPPPTLIGTPLEPPAPSL

SEQ ID NO: 258 - protein, 203 aa, Homo sapiens [sequence omitted]

SEQ ID NO: 259 - protein, 90 aa, Homo sapiens [sequence omitted]

SEQ ID NO: 260 - protein, 84 aa, Homo sapiens; identical to SEQ ID NO: 215

SEQ ID NO: 261 - protein, 80 aa, Homo sapiens
MRGSHHHHHHGSYLGDTIESSTHASGERAGEGARRHPRLRSARLPATLPSAARRARRPAAVAAAAAAGAPAGCRRGQGSA

SEQ ID NO: 262 - DNA, 884 bp, human
  misc_feature (19)..(19): n is a, c, g, or t
  misc_feature (656)..(656): n is a, c, g, or t
  misc_feature (719)..(719): n is a, c, g, or t
  misc_feature (735)..(735): n is a, c, g, or t
  misc_feature (737)..(737): n is a, c, g, or t
  misc_feature (750)..(750): n is a, c, g, or t
  misc_feature (760)..(760): n is a, c, g, or t
  misc_feature (788)..(788): n is a, c, g, or t
  misc_feature (823)..(823): n is a, c, g, or t
  misc_feature (847)..(847): n is a, c, g, or t
  misc_feature (859)..(859): n is a, c, g, or t
  misc_feature (877)..(877): n is a, c, g, or t
  misc_feature (879)..(879): n is a, c, g, or t
ttattaaagaggagaaatnacttgagaggatcgcatcaccatcaccatcacggatcctatttaggtgacactatagaatcgtcgacccacgcgtccggggccgagacgatggctgaccacaaccctgacagcgactccacgccgcgcacgctgctgcgacgcgtgctggatacagcggacccgcgcaccccgcggcgaccccggagtgctcgggctggagcccggagagccctgcttgaaacggcttcccccaggaagttgagtggccaaacaaggacgatagccagagggcgttcccatggagccaggtctgttggcagatcggcccatattcaggccagtgggcacttggaggaacagacacctcggacgctgctgaagaacatcctactaactgccccagaatcttccatcctgatgcctgagtcggtagtgaagccagtgccagcaccgcaggcggtccaaccctccagacaagagagcagttgcggcagcctggagctgcaacttcctgagctcgagccccccacaaccctggctccaggtctgctggcccctggcaggaggaaacagaggctgagactgtcagtgtttcagcagggagtggaccaggggctgtctctctcccaagagcctcaagggaatgctgatgcctnttccctcaccagatccctcaacctgacctttgccacacctcttcagccacagtcagtgcagangcctggcttggcccgnanaccttcagcccgncgagctgtanacgtgggtgccttttttgcgggatctgngaaatacttccctggctcctccaaacattggggtnggaggacacccagccgttcttttnagcccatgggtngggttcccccaagggggntnacttc

SEQ ID NO: 263 - DNA, 488 bp, human
tatgagaggtcgcatcaccatcaccatcacggatcctatttaggtgacactatagaatcgtcgacccacgcgtccgggcgcgtggaggctgcagtcacggtggcgcccgcggggacggaggagggaatgagtgaagaggagcaaggctccggcactaccacgggctgcgggctgcctagtatagagcaaatgctggccgccaacccaggcaagaccccgatcagccttctgcaggagtatgggaccagaatagggaagacgcctgtgtacgaccttctcaaagccgagggccaagcccaccagcctaatttcaccttccgggtcaccgttggcgacaccagctgcactggtcagggccccagcaagaaggcagccaagcacaaggcagctgaggtggccctcaaacacctcaaaggggggagcatgctggagccggccctggaggacagcagttctttttctcccctagactcttcactgcctgagga

SEQ ID NO: 264 - DNA, 1030 bp, human
  misc_feature (753)..(753): n is a, c, g, or t
  misc_feature (765)..(765): n is a, c, g, or t
  misc_feature (788)..(788): n is a, c, g, or t
  misc_feature (816)..(817): n is a, c, g, or t
  misc_feature (842)..(842): n is a, c, g, or t
  misc_feature (845)..(845): n is a, c, g, or t
  misc_feature (856)..(856): n is a, c, g, or t
  misc_feature (868)..(868): n is a, c, g, or t
  misc_feature (871)..(871): n is a, c, g, or t
  misc_feature (899)..(901): n is a, c, g, or t
  misc_feature (904)..(904): n is a, c, g, or t
  misc_feature (916)..(916): n is a, c, g, or t
  misc_feature (927)..(927): n is a, c, g, or t
  misc_feature (931)..(931): n is a, c, g, or t
  misc_feature (938)..(938): n is a, c, g, or t
  misc_feature (947)..(948): n is a, c, g, or t
  misc_feature (952)..(952): n is a, c, g, or t
  misc_feature (955)..(955): n is a, c, g, or t
  misc_feature (958)..(958): n is a, c, g, or t
  misc_feature (960)..(960): n is a, c, g, or t
  misc_feature (976)..(977): n is a, c, g, or t
  misc_feature (980)..(981): n is a, c, g, or t
  misc_feature (985)..(986): n is a, c, g, or t
  misc_feature (996)..(996): n is a, c, g, or t
  misc_feature (1004)..(1005): n is a, c, g, or t
  misc_feature (1007)..(1007): n is a, c, g, or t
  misc_feature (1017)..(1018): n is a, c, g, or t
  misc_feature (1022)..(1022): n is a, c, g, or t
aatagagagaattactatgagaggatcgcatcaccatcaccatcacggatcctatttaggtgacactatagaatcgtcgacccacgcgtccgctccatctcgcccatctccagattcttcagaaagtgactgggaaactttggatcctagtgtcttagaggaccccaacttgaaagaaagggaacagctgggatcagaccagacaaatttgtttccaaaggactctgtcccctcagagagtcttccaattactgtacaacctcaagctaatacgggacaggtagtcctgataccagggctcatttcgggtttggaagaggatcagtatggcatgcccctggccatcttcacaaagggatatctgtgtttgccttacatggcattgcagcagcatcatcttctctccgatgtcaccgttcgggggtttgttgctggagctactaacatcctttttcgacaacagaaacacctcagtgatgccattgtggaagtagaagaagctctgatccagatccatgatccagaactcaggaagctgcttaacccaaccactgcagacctaaggttcgcagactacctagtgaggcacgtgactgagaatcgggatgacgtcttcctagatggcacgggctgggagggaggtgacgaatggatccgggcccagtttgcggtctacattcatgccctgctggctgccacgctgcaattagacaatgaaaagatattatcggactatgggacaacttttgttancagcatggaaanaataactcacaaactacagggtngtggaaacagcaaccaagcatccagccnntttgcagaaattaaattccaaaacnatnccattttcaanggccaatactcnatnatcagaaaatgaagtttaaggtttctcnnnttngggttcaaaaanaggggaaacgnggcnaaaaaanttggaaacnntctnggnccnanctagccggaatggttnntannaacnngaaaaacctntttggccnntncaatttggannaacnttttttcc

SEQ ID NO: 265 - DNA, 984 bp, human
  misc_feature (3)..(3): n is a, c, g, or t
  misc_feature (10)..(10): n is a, c, g, or t
  misc_feature (867)..(867): n is a, c, g, or t
  misc_feature (871)..(871): n is a, c, g, or t
  misc_feature (883)..(883): n is a, c, g, or t
  misc_feature (886)..(886): n is a, c, g, or t
  misc_feature (902)..(902): n is a, c, g, or t
  misc_feature (905)..(905): n is a, c, g, or t
  misc_feature (912)..(912): n is a, c, g, or t
  misc_feature (940)..(940): n is a, c, g, or t
  misc_feature (942)..(942): n is a, c, g, or t
  misc_feature (957)..(957): n is a, c, g, or t
  misc_feature (963)..(963): n is a, c, g, or t
  misc_feature (966)..(966): n is a, c, g, or t
  misc_feature (978)..(978): n is a, c, g, or t
aantagaganaattactatgagaggatcgcatcaccatcaccatcacggatcctatttaggtgacactatagaatcgtcgacccacgcgtccgcggacgcgtgggcggacgcgtgggcggacgcgtgggcgcccgcggggccgggtgcgatggcggcggtggctgcgttgcagctggggctgcgggcggcggggctgggacgggtccagcgtcggaagtggaagctgaacctgattgcagagttggagtccagagttctggctgagcctgtccctctgccagccgacccaatggaactgaaaaatctggagtataggccagtgaaggtcagggggtgctttgaccattccaaggagctgtatatgatgccccggaccatggtggaccctgtccgggaggcccgggagggcggcctcatctcctcctcaactcagagtggggcctatgtggtcactcccttccactgcaccgacctgggagtcaccatcctggtaaatagagggttcgttcccaggaagaaagtgaatcctgaaacccggcagaaaggccagattgagggagaagtggacctcattgggatggtgaggctgacagaaaccaggcagccttttgtccctgagaacaatccagaaaggaaccactggcattatcgagacctggaagctatggccagaatcacaggcgcagagcccatcttcattgatgccaacttccagagcacagtccctggaggacccattggagggcaaaccagagttactctgaggaacgagcatctgcagtacatcgtgacctggtatggactctctgcagctacatcctacctgtggtttaaaaaaattcctacgtgggacacctggtgtgtgnacanatcagcttgctnaancccctgtcccctgganaantgcagtnatttcaagactgccctttaatgctggantnatgttgctactgggnataaanttnctgggcccttcnaccctt

SEQ ID NO: 266 - DNA, 873 bp, human
  misc_feature (429)..(429): n is a, c, g, or t
  misc_feature (692)..(692): n is a, c, g, or t
  misc_feature (755)..(755): n is a, c, g, or t
  misc_feature (771)..(772): n is a, c, g, or t
  misc_feature (837)..(837): n is a, c, g, or t
  misc_feature (840)..(840): n is a, c, g, or t
  misc_feature (864)..(864): n is a, c, g, or t
agagagatactatgagaggtcgcatcaccatcaccatcacggatcctatttaggtgacactatagaatcgtcgactctggaccttggctgtcactcagttaaagaccacgactcccctgagaacggtgcggacagcttcgatagctcagactccctcctccagtcctggaacagccagtcgtccttgctggatgtgcaacgggttccttccttcgagagcttcgaagatgactgcagccagtctctctgcctcaataagccaaccatgtctttcaaggattacatccaagagaggagtgacccggtggagcaaggcaaaccagttatacctgcagctgtgctggccggcttcacaggaagtggacctattcagctgtggcagtttctcctggagctgctatcagacaaatcctgccagtcattcatcanctggactggagacggatgggagtttaagctcgccgaccccgatgaggtggcccgccggtggggaaagaggaaaaataagcccaagatgaactacgagaagctgagccggggcttacgctactattacgacaagaacatcatccacaagacgtcggggaagcgctacgtgtaccgcttcgtgtgcgacctccaaaacttgctggggttcacgcccgaggaactgcacgccatcctgggcgtccagcccgacacggaggactgangtcgccgggggaccacctgagcggctccaggctcgtggactgagtgggaagcccatcctgacnagctgctccgaggacnncaggaagcaggatggaaatgtccaggaaagtgcccagaaacagtggccttattgcatccaaacangcntctgacaggctgcctccttgtggngcaacggcc

SEQ ID NO: 267 - DNA, 857 bp, human
gagatactatgagaggtcgcatcaccatcaccatcacggatcctatttaggtgacactatagaatcgtcgactctggaccttggctgtcactcagttacgaggagcctgaaatatggaaaactaggtcagggggttttggtccaggtttccccctccctggtgaaacggcagaagacccactttcatgatttgccatgtggtgcctcagtgattctcggtaacaacggcttcatctggatttacccaacacctgagcacaaagaagaggaagcagggggcttcattgcaaacctggagcctgtctctcttgctgatcgagaggtgatatcccggcttcggaactgcatcatctcgctggtaactcagaggatgatgctgtatgataccagcatcctgtactgctatgaagcatcccttccacatcagatcaaagacatcttaaagccagaaataatggaggagattgtgatggaaacacgccagaggcttttggaacaggagggataaggaggtgctccagaagcacgggactgtggaccttgcaggagtgaagactgtgatgtgtggtccccatatgtggctcagcaaagactcgagagatcatccctttgtctgcattgacggccctgtgacggcctccagcccacaggcctgctttctcctgtcctaacaccaagcctgggtggcagatgaacagtgcttccttgggttgcagctgagtccggtattagggatagtttcagctctttcaagtgcacagtgtacagtcgaatggctccatcctgaatatatggagatcccttgtctcactcacgtcatcacaggcacatgcccatgaaatgccccatagaacatg

SEQ ID NO: 268 - DNA, 615 bp, human
tagagaaattaactatgagaggatcgcatcaccatcaccatcacggatcctatttaggtgacactatagaatcgtcgacccacgcgtccgcccacgcgtccggtctttgtgtgtgtatgtgtgatctctgcctgcaggaccagcccggtggcaccctggatctgaccctgatccgtgcccgcctccaggagaagttgtcacctccctacagctccccacaggagtttgcccaggatgtgggccgcatgttcaagcaattcaacaagttaactgaggacaaggcagacgtgcagtccatcatcggcctgcagcgcttcttcgagacgcgcatgaacgaggccttcggtgacaccaagttctctgctgtgctggtggagcccccgccgatgagcctgcctggtgctggcctgagttcccaggagctgtctggtggccctggtgatggcccctgaggctggagcccccatggccagcccagcctggctctgttctctgtcctgtcaccccatccccactcccctggtggcctgactcccactccctggtggccccatcccccagttcctcacgatatggtttttacttctgtggatttaataaaaacttcaccagttc

SEQ ID NO: 269 - DNA, 1164 bp, human
  misc_feature (944)..(944): n is a, c, g, or t
  misc_feature (961)..(961): n is a, c, g, or t
  misc_feature (975)..(975): n is a, c, g, or t
  misc_feature (986)..(986): n is a, c, g, or t
  misc_feature (1007)..(1007): n is a, c, g, or t
  misc_feature (1010)..(1010): n is a, c, g, or t
  misc_feature (1014)..(1014): n is a, c, g, or t
  misc_feature (1021)..(1021): n is a, c, g, or t
  misc_feature (1024)..(1024): n is a, c, g, or t
  misc_feature (1052)..(1052): n is a, c, g, or t
  misc_feature (1066)..(1066): n is a, c, g, or t
  misc_feature (1069)..(1069): n is a, c, g, or t
  misc_feature (1078)..(1078): n is a, c, g, or t
  misc_feature (1090)..(1090): n is a, c, g, or t
  misc_feature (1104)..(1104): n is a, c, g, or t
  misc_feature (1136)..(1136): n is a, c, g, or t
  misc_feature (1140)..(1140): n is a, c, g, or t
  misc_feature (1144)..(1144): n is a, c, g, or t
  misc_feature (1148)..(1148): n is a, c, g, or t
  misc_feature (1154)..(1155): n is a, c, g, or t
  misc_feature (1157)..(1157): n is a, c, g, or t
  misc_feature (1159)..(1159): n is a, c, g, or t
tagagaaattactatgaagaggatcgcatcaccatcaccatcacggatcctatttaggtgacactatagaatcgtcgacccacgcgtccgcttacattgtggatggcttgagggagtgctgccagcctgtgctggtttacattcctccccaggctgagctgcggggtggctcctgggtggtgattgactcctccatcaacccccggcacatggagatgtatgctgaccgagaaagcaggggatctgttctggagccagaagggacagtagaaatcaaattccgcagaaaggatctggtgaaaaccatgcgtcgggtggacccagtctacatccacttggctgagcgattggggaccccagagctaagcacagctgagcggaaggagttggagaacaagttgaaggagcgggaggaattcctaattcccatttaccatcaggtagccgtgcagtttgctgacttgcacgacacaccaggccggatgcaggagaagggtgttattagcgatatcctggattggaaaacatcccgtaccttcttctactggcggctgaggcgtcttctgctggaggacctggtcaagaagaaaatccacaatgccaaccctgagctgactgatggccagattcaagccatgttaaggcgctggtttgtggaagtggaaggaacagtgaaggcttatgtttgggacaataataaggatctggcggagtggctagagaaacagctgacagaggaggatggtgttcactcggtaatagaggaaaacatcaaatgcatcagcagagactacgtcctcaagcaaatccgcagcttggtccaggccaatccagaggttgccatggattccatcatccatatgacgcagcacatatcacccactcagcgagcagaagtcatacggatcctctccacaatggattccccttccacgtaagaagancttcctgcctgtcctgnccctgtctctgganaaaagggctanagctgccttttacaactgtanccnctgntaatganaangcccaggaaacccaccctggagtcaaanggcatttacttccnccngttcaggtnatgcagacatcngggagtaaatcaanaatcccctcagccacagtcaactacccatcanattntacnggcnggctanncncnctcct

SEQ ID NO: 270 - DNA, 1214 bp, human
  misc_feature (896)..(896): n is a, c, g, or t
  misc_feature (911)..(911): n is a, c, g, or t
  misc_feature (938)..(938): n is a, c, g, or t
  misc_feature (946)..(946): n is a, c, g, or t
  misc_feature (961)..(961): n is a, c, g, or t
  misc_feature (979)..(979): n is a, c, g, or t
  misc_feature (986)..(986): n is a, c, g, or t
  misc_feature (996)..(996): n is a, c, g, or t
  misc_feature (1007)..(1007): n is a, c, g, or t
  misc_feature (1012)..(1012): n is a, c, g, or t
  misc_feature (1026)..(1026): n is a, c, g, or t
  misc_feature (1032)..(1032): n is a, c, g, or t
  misc_feature (1044)..(1044): n is a, c, g, or t
  misc_feature (1046)..(1046): n is a, c, g, or t
  misc_feature (1054)..(1054): n is a, c, g, or t
  misc_feature (1060)..(1061): n is a, c, g, or t
  misc_feature (1067)..(1067): n is a, c, g, or t
  misc_feature (1078)..(1078): n is a, c, g, or t
  misc_feature (1083)..(1084): n is a, c, g, or t
  misc_feature (1092)..(1092): n is a, c, g, or t
  misc_feature (1099)..(1099): n is a, c, g, or t
  misc_feature (1102)..(1102): n is a, c, g, or t
  misc_feature (1105)..(1105): n is a, c, g, or t
  misc_feature (1107)..(1107): n is a, c, g, or t
  misc_feature (1129)..(1129): n is a, c, g, or t
  misc_feature (1141)..(1141): n is a, c, g, or t
  misc_feature (1146)..(1146): n is a, c, g, or t
  misc_feature (1153)..(1153): n is a, c, g, or t
  misc_feature (1166)..(1166): n is a, c, g, or t
  misc_feature (1178)..(1178): n is a, c, g, or t
  misc_feature (1190)..(1190): n is a, c, g, or t
  misc_feature (1195)..(1195): n is a, c, g, or t
  misc_feature (1201)..(1202): n is a, c, g, or t
  misc_feature (1204)..(1204): n is a, c, g, or t
  misc_feature (1208)..(1208): n is a, c, g, or t
  misc_feature (1210)..(1210): n is a, c, g, or t
  misc_feature (1212)..(1212): n is a, c, g, or t
tagagaaattactatgagaggatcgcatcaccatcaccatcacggatcctatttaggtgacactatagaatcgtcgacccacgcgtccgcagaactgggtgatgctgctctgaggagccatctggatatgagctggcctctgttctcacagggcatttctgaacagcagagtgggctcagtgttctcctcagttctctccaggtcccccccaggggagaggattccctggaggtccctgtggagcagtttcgaatagaagagattgcagagggtagggaggaagcagttcttccaatcccagtagatgcaaaagttggctatggtacctcacagtcatgttctctgctaccttcccaagtcccttttgagaccagaggaccaaacgtggacagttctacagacatgttagtggaagataaggtgaagtcagtaagtgggccccaaggtcatcatagatcttgccttgtaaatagtggcaaggacaggcttcctcagaccatggaacccagcccttcagagacaagcctggtcgagaggccccaagtggggtctgtggtgcataggacttcccttggcagcactctcagcctgacacgttccccttgtgccttgcctttagccgaatgtaaagaggggcttgtgtgcaatggtgccccagagactgaaaacagggcctcagagcagcccccaggtcttagcaccctccagatgtaccccacacccaatgggcattgcgccaatggggaggctggtaggagcaaggactcactgagccgtcagctgtctgctatgagctgcagctctgcccacttacactcaaggaacttgcaccacaagtggctgcatagccactcaggaaggccatctgcaaccagcagccccgaccagccttccngcagccacctggacnatgatggcatgtcagtgtacacagacncgatccancagcgcctgcgtcanattgagtcaggcccccancaggaantaaaaacttngaaaaaacaantccgnaactaaaaatcccntgaaanccatacctgacnanctccctanctttanngaaaanttggggagagngactnnatccccantcgaaancantcngnataaaatgttttttccttcacnaaaaattttttnaaccnctggaanagggaaaaagaanaaaaaccgtggnttctgaccctgnccccngttttnngnaaancntngg

SEQ ID NO: 271 - DNA, 565 bp, human
  misc_feature (542)..(563): n is a, c, g, or t
  misc_feature (565)..(565): n is a, c, g, or t
tcttaaagaggagaattaactatgagaggatcgcatcaccatcaccatcacggatcctatttaggtgacactatagaatcgtcgacccacgcgtccggtgtagcagatccacacaacttaaagatctgctgccgagtgaatggggaagtcgtccagagcagcaacaccaaccagatggtattcaagacagaggacctgatagcctgggtctcccagtttgttaccttttacccaggggatgtcatcctaactgggacccccccaggtgtcggtgtattcaggaaacctcctgtctttctcaagaagggggatgaagtccagtgtgagattgaagaactaggtgtcatcatcaacaaggtggtgtgatggctcctgcacaggcccgacataggatgagggcatctgctcccactcagcctagcccagggaaaggcccagtggcaggtgtgggcaggtgccagccctgcaagccgcctcttctcggtagaagggagaaggacagagctctcttcaataaatgcgtcgggtcaaagcagcaaaannnnnnnnnnnnnnnnnnnnnnan

SEQ ID NO: 272 - DNA, 892 bp, human
  misc_feature (708)..(708): n is a, c, g, or t
  misc_feature (779)..(779): n is a, c, g, or t
  misc_feature (809)..(809): n is a, c, g, or t
  misc_feature (818)..(818): n is a, c, g, or t
  misc_feature (892)..(892): n is a, c, g, or t
ggaaatactatgagaggtcgcatcaccatcaccatcacggatcctatttaggtgacactatagaatcgtcgactctggaccttggctgtcactcagttaagtttaacgaaaaggatgggcatgttgagagaaagagcaagaatggcctgtatgagattgaaaatggaagaccgagaaatcctgcaggacggactggactggtgggccgggggcttttggggcgatggggcccaaatcacgctgcagatcccattataaccagatggaaaagggatagcagtggaaataaaatcatgcatcctgtttctgggaagcatatcttacaatttgttgcaataaaaaggaaagactgtggagaatgggcaatcccaggggggatggtggatccaggagagaagattagtgccacactgaaaagagaatttggtgaggaagctctcaactccttacagaaaaccagtgctgagaagagagaaatagaggaaaagttgtacaaactcttcagccaagaccacctagtgatatataagggatatgttgatgatcctcgaaacactgataatgcatggatggagacagaagctgtgaactaccatgacgaaacaggtgagataatggataatcttatgctagaagctggagatgatgctggaaaagtgaaatgggtggacatcaatgataaactgaagctttatgccagtcactctncattcatcaaacttgtggctgagaaacgagatgcacactggagcgaggactctgaagctgactgccatgcngtgtagctgatggtctcccgtgtagccaangcccacagnagagcatatactgaaaagaagcagtatcacgaattatactataaaagggcaggtaagccactgcctattacttn

SEQ ID NO: 273 - DNA, 855 bp, human
tgagaggtcgcatcaccatcaccatcacggatcctatttaggtgacactatagaatcgtcgactctggaccttggctgtcactcagttgaggaggaggatgaggacaccggatggagtggggcctacctgccgtccgccatcgagcagactcaccccgagagggtccctgccggcacgtcgccctgcagcacatacctttcctttttctccaccccgtcggagctggcagggcctgagtctctgccctcgtgggcgttgagtgacactgattctcgcgtgtctccggcctctccggcagggagtcctagcgcagactttgcggttcatggagagtctctgggagacaggcacctgcggacgctgcagataagttacgacgcactgaaagatgaaaattctaagctgagaagaaagctgaatgaggttcagagcttctctgaagctcaaacagaaatggtgaggacgcttgagcggaagttagaagtaaaaatgatcaaggaggaaagcgactaccacgacctggagtcggtggttcagcaggtggagcagaacctggagctgatgaccaaacgggctgtaaaggcagaaaaccacgtcgtgaaactaaaacaggaaatcagtttgctccaggcgcaggtctccaacttccagcgagagagtgaagccctgcggtgcggccagggtgccagcctgaccgtggtgaagcagaacgccgacgtggccctgcagaacctccgggtgtcatgaacagtgcacaggcttccatcagcactggtttcggagctgagacctgaatctgttgcgaattcttaatctatgacagattctggagttaagacgagagaagactctga

SEQ ID NO: 274 - DNA, 293 bp, human
  misc_feature (4)..(4): n is a, c, g, or t
  misc_feature (6)..(6): n is a, c, g, or t
  misc_feature (15)..(15): n is a, c, g, or t
  misc_feature (20)..(20): n is a, c, g, or t
  misc_feature (26)..(26): n is a, c, g, or t
  misc_feature (33)..(33): n is a, c, g, or t
  misc_feature (42)..(42): n is a, c, g, or t
  misc_feature (71)..(71): n is a, c, g, or t
  misc_feature (78)..(78): n is a, c, g, or t
  misc_feature (93)..(93): n is a, c, g, or t
  misc_feature (101)..(101): n is a, c, g, or t
  misc_feature (132)..(133): n is a, c, g, or t
  misc_feature (141)..(141): n is a, c, g, or t
  misc_feature (152)..(152): n is a, c, g, or t
  misc_feature (162)..(162): n is a, c, g, or t
  misc_feature (215)..(215): n is a, c, g, or t
  misc_feature (219)..(220): n is a, c, g, or t
  misc_feature (224)..(224): n is a, c, g, or t
  misc_feature (238)..(238): n is a, c, g, or t
  misc_feature (242)..(242): n is a, c, g, or t
  misc_feature (244)..(244): n is a, c, g, or t
  misc_feature (247)..(248): n is a, c, g, or t
  misc_feature (255)..(255): n is a, c, g, or t
  misc_feature (258)..(258): n is a, c, g, or t
  misc_feature (266)..(266): n is a, c, g, or t
  misc_feature (269)..(271): n is a, c, g, or t
  misc_feature (275)..(275): n is a, c, g, or t
  misc_feature (292)..(292): n is a, c, g, or t
cccnancattgaganattantatggngaggatngcatcaccntcaccatcacgggatcctatttaggtganactatanaatcgatctacccangagggcgnccacgtcatccgcgctcataccccgccgcanncggctggnacgtacggtancccgcaagtnccgggccgaggtccgaggaggcgtcctctgcccggtggcccagaggtcaatcngggnncggngttcatcttgcatngttntntcnnggccgcnatncgtccccngannngccnctgaggtcgaccgcgant

SEQ ID NO: 275 - DNA, 1369 bp, human
  misc_feature (1)..(1): n is a, c, g, or t
  misc_feature (10)..(11): n is a, c, g, or t
nggcggggtnnaacggtcgtgacagagaggatgcatcccatcaccatcacggtcgacccacgcgtccgggtcgtgcccccagcccgctgcccaggccatgccgccccatctgcgcgcggagccgcggctgccgggcctccggggctgagccgggagcgccgggaggaggaggcgccggcggcggagcaggagcgggagccgcggcggcgggcagcgcgggacccagtactatggctgtgtactgctatgcgctcaatagcctggtgatcatgaatagcgccaacgagatgaagagcggcggcggcccggggcccagtggcagcgagacgcccccgcccccgaggagggcagtgctgagccccggcagcgttttcagccccgggagaggcgcctctttcctcttccccccagccgagtcgctgtcccccgaggagccccggagccccgggggctggcggagcggccggcgcaggctgaatagtagcagcggcagtggcagcggcagcagcggcagtagcgtgagcagcccaagttgggctggtcggctgcgaggggaccggcagcaggtggtggcagccggtaccctctccccgccagggccggaggaggccaagaggaagctgcggatcttgcagcgcgagttgcagaacgtgcaggtgaaccagaaagtgggcatgtttgaggcgcacatccaggcacagagctccgccattcaagcgccccgcagcccgcgtttgggcagggctcgctcgccctccccgtgccccttccgcagcagcagtcagccccctggaaagggcccgggttccaggcgccccggaccgacgaacggcagaacaaaatcctgcggtctacaaagctccgtccacttcccgaatccctctcccgctagtcactcagtcacctcccataccacttctcatccaaaacaacccactcctcctcctcccccccccccgtctccccatacgctcccccgcgtcacgctccaccctatcctccacttaatctccccactcaccacatctccatctacctcacccattacccattatactacatctcacacaccaacccccctcaaccccacaccccctcatcccaaacactcactcctaaccctactacacctcaatctcatacataccccatacacccttatcccatattcctcccctctcttctcacttcaccttctccactccacccctccatctccccctcctcatccacccccatccactcccccacccaactcccatcctctacatctctacttactcttcacatctctctacaaacatactacacatcacattaccactcataaacactatctcctactccatccgtatctatccacatacat

SEQ ID NO: 276 - DNA, 1146 bp, human
  misc_feature (4)..(4): n is a, c, g, or t
  misc_feature (17)..(17): n is a, c, g, or t
  misc_feature (36)..(36): n is a, c, g, or t
  misc_feature (906)..(906): n is a, c, g, or t
  misc_feature (935)..(935): n is a, c, g, or t
  misc_feature (957)..(957): n is a, c, g, or t
  misc_feature (960)..(960): n is a, c, g, or t
  misc_feature (969)..(969): n is a, c, g, or t
  misc_feature (978)..(978): n is a, c, g, or t
  misc_feature (980)..(980): n is a, c, g, or t
  misc_feature (984)..(984): n is a, c, g, or t
  misc_feature (994)..(994): n is a, c, g, or t
  misc_feature (998)..(998): n is a, c, g, or t
  misc_feature (1013)..(1013): n is a, c, g, or t
  misc_feature (1017)..(1017): n is a, c, g, or t
  misc_feature (1060)..(1060): n is a, c, g, or t
  misc_feature (1075)..(1075): n is a, c, g, or t
  misc_feature (1085)..(1085): n is a, c, g, or t
  misc_feature (1093)..(1093): n is a, c, g, or t
  misc_feature (1095)..(1095): n is a, c, g, or t
  misc_feature (1097)..(1097): n is a, c, g, or t
  misc_feature (1113)..(1113): n is a, c, g, or t
  misc_feature (1117)..(1117): n is a, c, g, or t
  misc_feature (1125)..(1146): n is a, c, g, or t
gatngagagaattactntgagaggatcgcatcaccntcaccatcacggatcctatttaggtgacactatagaatcgtcgacccacgcgtccgctatcccaggcctagatgatgtcacagttgaagtatctcctttaaatgtcaccagtgtcacaaatggagcacatcctgaagccacttcagagcaaccacagaacagtacacaagactctggactacaggaaagtgaagtatcagcagaaaatatcttaactgtagccaaggatccaagatatgccagatatctcaaaatggttcaagtgggtgtaccagtgatggcaataagaaacaaaatgatatcagaaggactagacccagatcttcttgagaggccagatgctccagtgcctgatggcgaaagtgagaaaactgtagaagaaagttcagatagcgaatcttcttttagtgattaagcttaattttgataagaattacatatgcatgcataggggtacatttacattctgtaagagattgagcctgaactctcttagtcataaaaacatcaaatggccacatgtccactaccaagcttcttctatgttaaaaaaataataataaagcagttttaacctgccagtatgtcttgttgctaaaataaagggcctcaaaatgaaaaataggataacctaaataaagtacaattagtgctacaaatactaagatagaatattttagagatgcaatgagcaattacagtcaggcacggtggctcacgcctgtaatcccagcactttgggaggccgaggcgagtggataacctgaggtcaggagttcaagaccagcctggccaacatggtgaaacctccatctctactaaaaatacaaaaagtagctgggcgtggtgacaaaaattagctgggcgtantggcaggtgcctgtaatcccagctactcnggaagctgaggcaggagaatcnctngaaccccanaaggtaaangnttcngtgggctganatgncgtcattgccctccngccntggcgacaagagtgaaactctgtcttaaaataaaaagaatgcnatgaccatttttaanggaagtccgngggagttnangntcaaaagtaaacccangccnaaaaaaannnnnnnnnnnnnnnnnnnnnn

SEQ ID NO: 277 - DNA, 1075 bp, human
  misc_feature (935)..(935): n is a, c, g, or t
  misc_feature (937)..(937): n is a, c, g, or t
  misc_feature (954)..(954): n is a, c, g, or t
  misc_feature (971)..(971): n is a, c, g, or t
  misc_feature (1006)..(1007): n is a, c, g, or t
  misc_feature (1016)..(1016): n is a, c, g, or t
  misc_feature (1019)..(1019): n is a, c, g, or t
  misc_feature (1021)..(1021): n is a, c, g, or t
  misc_feature (1023)..(1023): n is a, c, g, or t
  misc_feature (1025)..(1025): n is a, c, g, or t
  misc_feature (1027)..(1027): n is a, c, g, or t
  misc_feature (1067)..(1067): n is a, c, g, or t
  misc_feature (1071)..(1071): n is a, c, g, or t
  misc_feature (1075)..(1075): n is a, c, g, or t
tagagaaattactatgagaggatcgcatcaccatcaccatcacggatcctatttaggtgacactatagaatcgtcgacccacgcgtccgcagatttagcaactcagaaggctaaagaagaaacaaaagaagcagggtccctgaggtcggtgctcaataaagagtctcattcaccctttgggctggactcgttcaactccactgcaaaggtctctccgctgactccaaagctttttaacagtctgttgctgggtcccactgcctccaacaacaaaaccgaagggtctagccttcgagacctccttcactccgggccgggaaaacttcctcaaacccccttggacacaggcataccctttcccccggtcttctctacatcctcagcaggagtgaagagcaaggccagcctacccaactttcttgaccacatcattgcctcagtggtagaaaataagaaaacctcagatgcttcaaagcgggcctgcaacttgactgatacccagaaggaagtgaaggagatggtgatggggttaaatgtgctagatccccatacttctcactcctggctttgtgatgggaggcttctgtgtctccatgaccccagcaacaaaaacaattggaagatcttccgggagtgttggaagcaaggtcagccagtgctggtttcgggggtacataaaaagctcaagtctgagctctggaagccagaagcctttagccaggaatttggagaccaggatgtagacttggtgaactgcaggaactgtgctataatttccgatgtgaaagttcgggatttctgggatggtttcgagatcatatgcaaacgactacggtcagaagatgggcagccaatggtgctcaaactcaaggactggcctcctggggaaaaattttccgagacatgatgccaaccaggttttgaagatctgatgnanaaccttcctctggccanaatatacccaaacgaanatggcagggctcaatctgggcctctaggctacctnnctactttgnaangncngnanttggggcccccaaaaaagtacaacgccctatggggttganaacngccn

SEQ ID NO: 278 - DNA, 900 bp, human
  misc_feature (758)..(758): n is a, c, g, or t
  misc_feature (853)..(853): n is a, c, g, or t
atagagagatactatgagaggtcgcatcccatcaccatcacggatcctatttaggtgacactatagaatcgtcgactctggaccttggctgtcactcagttaaagagaaggagagactgagagacagggaccgagagcgcgaccgggacaaagggaaggacagggacagacggagagtgaaaaacggggagcactcctgggacctggacagggagaagaacagagagcatgacaaacccgagaaaaagtcagcaagctcaggggagatgtctaaaaagttatcagatggaacttttaaagactccaaggctgaaacagagactgagatttccactagagcttccaagtcattgacaacaaaaacatcaaaacggcgatccaaaaattcagtggaaggtgactccaccagtgatgcagaaggagatgctggacctgctggccaagataagtctgaggtgccagagactccagaaattcctaatgagctttcatccaacatcagaagaattcctcggcctgggagtgcaagaccagcccctccccgggtcaaacggcaagacagcatggaggcgctacaaatggataggtcagggagtggtaaaaccgtttcaaatgtgattacagagtcacacaattctgacaatgaagaggatgatcaatttgtggtggaagctgcccctcagctctctgaaatgtcagaaattgaaatggtaacagcagtggaactagaagaagaggagaagcatggtggacttgtngaaaaaattttggagacgaagaaagattatgagaaattgcagcagtcacccaacctggggagaagagcgatctctctttgagtcgcatggagaangagaagacatcgttccagggagataagagctcgcacgtcatcagacc

SEQ ID NO: 279 - DNA, 528 bp, human
atggacatcgccatccaccacccctggatccgccgccccttctttcctttccactcccccagccgcctctttgaccagttcttcggagagcacctgttggagtctgatcttttcccgacgtctacttccctgagtcccttctaccttcggccaccctccttcctgcgggcacccagctggtttgacactggactctcagagatgcgcctggaaaaggacaggttctctgtcaacctggatgtgaagcacttctccccagaggaactcaaagttaaggtgttgggagatgtgattgaggtgcatggaaaacatgaagagcgccaggatgaacatggtttcatctccagggagttccacaggaaataccggatcccagctgatgtagaccctctcaccattacttcatccctgtcatctgatggggtcctcactgtgaatggaccaaggaaacaggtctctggccctgagcgcaccattcccatcacccgtgaagagaagcctgctgtcaccgcagcccccaagaaatag

SEQ ID NO: 280 - DNA, 1209 bp, human
  misc_feature (933)..(933): n is a, c, g, or t
  misc_feature (938)..(938): n is a, c, g, or t
  misc_feature (947)..(947): n is a, c, g, or t
  misc_feature (977)..(977): n is a, c, g, or t
  misc_feature (996)..(996): n is a, c, g, or t
  misc_feature (1009)..(1009): n is a, c, g, or t
  misc_feature (1015)..(1015): n is a, c, g, or t
  misc_feature (1037)..(1037): n is a, c, g, or t
  misc_feature (1050)..(1050): n is a, c, g, or t
  misc_feature (1052)..(1052): n is a, c, g, or t
  misc_feature (1061)..(1061): n is a, c, g, or t
  misc_feature (1066)..(1066): n is a, c, g, or t
  misc_feature (1076)..(1076): n is a, c, g, or t
  misc_feature (1083)..(1084): n is a, c, g, or t
  misc_feature (1087)..(1087): n is a, c, g, or t
  misc_feature (1091)..(1092): n is a, c, g, or t
  misc_feature (1104)..(1104): n is a, c, g, or t
  misc_feature (1117)..(1117): n is a, c, g, or t
  misc_feature (1119)..(1119): n is a, c, g, or t
  misc_feature (1128)..(1128): n is a, c, g, or t
  misc_feature (1133)..(1134): n is a, c, g, or t
  misc_feature (1139)..(1139): n is a, c, g, or t
  misc_feature (1157)..(1157): n is a, c, g, or t
  misc_feature (1163)..(1163): n is a, c, g, or t
  misc_feature (1179)..(1179): n is a, c, g, or t
  misc_feature (1182)..(1182): n is a, c, g, or t
  misc_feature (1186)..(1186): n is a, c, g, or t
  misc_feature (1189)..(1190): n is a, c, g, or t
  misc_feature (1197)..(1197): n is a, c, g, or t
  misc_feature (1200)..(1200): n is a, c, g, or t
  misc_feature (1205)..(1205): n is a, c, g, or t
agaaattactatgagaggatcgcatcaccatcaccatcacggatcctatttaggtgacactatagaatcgtcgacccacgcgtccggtgtagaccttttagccgatgctgtggccgttacaatggggccaaagggaagaacagtgattattgagcagagttggggaagtcccaaagtaacaaaagatggtgtgactgttgcaaagtcaattgacttaaaagataaatacaagaacattggagctaaacttgttcaagatgttgccaataacacaaatgaagaagctggggatggcactaccactgctactgtactggcacgctctatagccaaggaaggcttcgagaagattagcaaaggtgctaatccagtggaaatcaggagaggtgtgatgttagctgttgatgctgtaattgctgaacttaaaaagcagtctaaacctgtgaccacccctgaagaaattgcacaggttgctacgatttctgcaaacggagacaaagaaattggcaatatcatctctgatgcaatgaaaaaagttggaagaaagggtgtcatcacagtaaaggatggaaaaacactgaatgatgaattagaaattattgaaggcatgaagtttgatcgaggctatatttctccatactttattaatacatcaaaaggtcagaaatgtgaattccaggatgcctatgttctgttgagtgaaaagaaaatttctagtatccagtccattgtacctgctcttgaaattgccaatgctcaccgtaagcctttggtcataatcgctgaagatgttgatggagaagctctaagtacactcgtcttgaataggctaaaggttggtcttcaggttgtggcagtcaaggctccaggggtttggtgacaatagaaagaaccagcttaaagatatggctattgctactggtggtgcagtgnttggnaaaaaaggnatgaccctgaatcttgaaacgtcagcctcntgactaagaaaagttgganagtctttgtgacnaagacnagcctgctcttaaaggaaaggngacagggctccantngaaaacgtntccanaatcttgacngttaatnnccncctnngaattgaaaggnaaactgatgacgntngcaacttcnagganngctgnctaagtggggacaatttnttaatnatgaaaaaacaattcnatncctntgnnaaactcnttnaaagntttt

SEQ ID NO: 281 - DNA, 992 bp, human
catcaccatcaccatcacggatcctatttaggtgacactatagaatcgtcgacccacgcgtccgtgagtggtagcctttcccctcaaccagcaatggaggagcagccccagatgcaagacgccgacgagcccgcggactccggaggggaaggccgggcaggcgggccaccgcaggtcgccggcgcccaggcggcgtgcagcgaggaccgcatgaccctgctcctcaggctgagagcacagacaaaacaacaactcttagaatataaatcaatggttgatgcaagtgaagaaaaaactccagaacaaattatgcaagaaaagcaaatcgaagctaaaattgaagacctggaaaatgaaattgaagaggtaaaagttgcttttgagataaaaaagcttgcattagacaggatgagactttcaactgcacttaaaaaaaacctggagaaaattagcagacagtctagtgtgctcatggataacatgaaacacctattagagctaaataaattaataatgaaatcacagcaggaatcttgggatttagaggaaaaactgcttgatattagaaagaagagattgcaattaaaacaagcttcagaaagtaagcttttagaaatacagactgaaaagaacaaacagaagattgatttggacagtatggaaactcagagaggataaagatcatacgacaaaacctacagatggagataaaaattactactgttattcaacatgtgttccagaaccttattttggggagtaaagtcaattgggcagaggatcctgcccttaaggaaattgttctgcagcttgagaagaatgttgacatgatgtaataagaattcttttctgacatattttacatttctggcaatctcaactcttatttggaatacttctgtgcatttgtctgtccaccgtaattttagaaaagcatatccataacgtttacagttgtagtacagttgtggttagttatttgtagtgggatt

SEQ ID NO: 282 - DNA, 1051 bp, human
  misc_feature (1)..(1): n is a, c, g, or t
  misc_feature (943)..(943): n is a, c, g, or t
  misc_feature (948)..(948): n is a, c, g, or t
  misc_feature (964)..(964): n is a, c, g, or t
  misc_feature (970)..(970): n is a, c, g, or t
  misc_feature (973)..(973): n is a, c, g, or t
  misc_feature (998)..(998): n is a, c, g, or t
  misc_feature (1005)..(1005): n is a, c, g, or t
  misc_feature (1039)..(1040): n is a, c, g, or t
naatagagaaattactatgagaggatcgcatcaccatcaccatcacggatcctatttaggtgacactatagaatcgtcgacccacgcgtccgatagcttaccgcaaggatcagactgttgctggacacgacgtctgtgtggagccaggaggaacacatgtggtgtctgtatggctgctctctacctaggacaccagctgccacttcttttgcctcatgaagaactcttgggccagccaaactgggaacctaggtgtctgggtcttgtgacaaccaaagcactttgacactaccccctgccgagagaagaggagtggatgagcctgcgggtttgcctcaagaaacttcatgagggtctcttactaactccattacactctctctcctggagcctcatctccatgtcaagcaggagggtaaagaagggaactaagagcaggtctttcaagccacacccccacctgcggatggatgggtttctctgtaggccatgcaggcctttgtcgcagcaaaccttcccagcagcccttgagccaagtaaaaccagcacaaccagccaccagtggttggtgaggcagtgcccacaaggctcatgttgtatgcctttgataaggccatcttggctttgagtagcagtgttcctcgtcacccatttccccctcaggattacaacacctgctatcaaatcatctaagctgaaaacatgagatgcgcttggaaaggcctagtcagaagccatttcctcttatcatttccctctcctatgcaccagtaaggcccgtccagagccccagcagggagtgggccctgagtccacactgtccctgagtgatccaggaggctgcccacatcccccacatgtgcactgtggttccagtgtagctgctgtgagcccactgccactgcctcaaaagggagccactgtgaacctctcgagtggctcnaaaancagtggcttttttganaatggnccnatacttctggcccggctggatgaanggaatgnccaaccctttggcctctccccctccttccatttnnttctctctctt

SEQ ID NO: 283 - DNA, 1175 bp, human
  misc_feature (9)..(9): n is a, c, g, or t
  misc_feature (937)..(937): n is a, c, g, or t
  misc_feature (942)..(942): n is a, c, g, or t
  misc_feature (989)..(989): n is a, c, g, or t
  misc_feature (997)..(997): n is a, c, g, or t
  misc_feature (1015)..(1015): n is a, c, g, or t
  misc_feature (1032)..(1032): n is a, c, g, or t
  misc_feature (1047)..(1047): n is a, c, g, or t
  misc_feature (1050)..(1050): n is a, c, g, or t
  misc_feature (1055)..(1055): n is a, c, g, or t
  misc_feature (1064)..(1064): n is a, c, g, or t
  misc_feature (1070)..(1070): n is a, c, g, or t
  misc_feature (1073)..(1073): n is a, c, g, or t
  misc_feature (1076)..(1077): n is a, c, g, or t
  misc_feature (1081)..(1083): n is a, c, g, or t
  misc_feature (1096)..(1096): n is a, c, g, or t
  misc_feature (1100)..(1101): n is a, c, g, or t
  misc_feature (1127)..(1127): n is a, c, g, or t
  misc_feature (1131)..(1132): n is a, c, g, or t
  misc_feature (1140)..(1140): n is a, c, g, or t
  misc_feature (1148)..(1148): n is a, c, g, or t
  misc_feature (1152)..(1152): n is a, c, g, or t
  misc_feature (1157)..(1157): n is a, c, g, or t
  misc_feature (1159)..(1159): n is a, c, g, or t
  misc_feature (1171)..(1171): n is a, c, g, or t
attagaggnaattactatgagaggatcgcatcaccatcaccatcacggatcctatttaggtgacactatagaatcgtcgacccacgcgtccggtcagcagaaaatcaaggaactggagttggaagtacttaaacacactcagagcattaaatcacagaacaacctacaggaaaagctggttcaggagaaatctaaagttgctgatgcagaggaaaagattttggacctgcagcggaaattagaacatgctcataaagtctgtctcacagacacttgtatttcagagaagcagcagctagaggaaaagataaaagaagcaacacaaaatgaagctaaagtaaagcaacaatatcaagaagaacaacagaagaggaaacttctatatcagaacgtagatgagttacacaggcaagtgagaaccttacaagataaagaaaatctactggaaatgacctgttctcagcaacaatccagaattcagcaacaagaggccctacttaaacaactggaaaatgaaaaaagaaaatatgatgagtctcgggtatttctttatagcagtgcaagaacagcttgacacagaaaattggtaccaagaagcggagcgttactaaaaaagatacctgaaaatgtggaagcaactttggaactgggtaacaggcagagattggaagagtttggagggctcagaagaaggcaggaggaccaggagcagtggctcacaactgtaatcccagcgcttgagaggctgaggtaggaggattgcttgaggccaggagttcaagaccagcctgggaaacatagtgagcccttgtctcaacaaaaaaataattagccagatatggtggcatggacctgtagtaccagctactcaggaggctgaggtgggaagatcacttgagctgggaggtcggggttgcaatgagccatgatcatgccnctacnctacagcctaggtgacccagcgagactctgtctcaaaaaaaaaaaangaggatgnaagtttgtaacttcttanagactggttaattgttntgacccaaatactgntanaaatntggacgggnaggccnccntanngggnnnccaatggaaatanggannttttgggaactggaaaaacgtccccnggtnncccctacnaaaactcncgcnttggntncttgtcccaggnttgg

SEQ ID NO: 284 - DNA, 984 bp, human
  misc_feature (8)..(8): n is a, c, g, or t
  misc_feature (707)..(707): n is a, c, g, or t
  misc_feature (803)..(803): n is a, c, g, or t
  misc_feature (814)..(814): n is a, c, g, or t
  misc_feature (837)..(837): n is a, c, g, or t
  misc_feature (840)..(840): n is a, c, g, or t
  misc_feature (868)..(868): n is a, c, g, or t
  misc_feature (880)..(880): n is a, c, g, or t
  misc_feature (885)..(885): n is a, c, g, or t
  misc_feature (894)..(894): n is a, c, g, or t
  misc_feature (898)..(898): n is a, c, g, or t
  misc_feature (912)..(912): n is a, c, g, or t
  misc_feature (914)..(914): n is a, c, g, or t
  misc_feature (916)..(916): n is a, c, g, or t
  misc_feature (919)..(919): n is a, c, g, or t
  misc_feature (927)..(928): n is a, c, g, or t
  misc_feature (933)..(933): n is a, c, g, or t
  misc_feature (939)..(939): n is a, c, g, or t
  misc_feature (943)..(943): n is a, c, g, or t
  misc_feature (946)..(946): n is a, c, g, or t
  misc_feature (959)..(959): n is a, c, g, or t
  misc_feature (973)..(973): n is a, c, g, or t
  misc_feature (975)..(977): n is a, c, g, or t
  misc_feature (981)..(981): n is a, c, g, or t
  misc_feature (984)..(984): n is a, c, g, or t
tagagganaattactatgagaggatcgcatcaccatcaccatcacggatcctatttaggtgacactatagaatcgtcgacccacgcgtccgccccgggcgacagcggtggcggctcctcggggtgctcggctccctcccacctaggccggccccggcccgactcgccctcagaaactcactgtttggggctgcggactttctcgtcgtgccccacaaaagtaaagcttggggacctggggggagccggaagtatcgcttcgagatccccaaatactatcggggaaacggaagtggccgtcggtggcagagacctgtcggccatggagcctaatgatagtaccagtaccgctgtggaggagcctgacagcttggaggtgttggtgaagaccttggactctcaaactcgtacctttattgtgggggcccagatgaatgtaaaagagtttaaggagcacattgctgcctctgtcagcatcccatctgaaaaacaacggctcatttaccagggacgagttctgcaagatgataagaagcttcaggaatacaatgttgggggaaaggttatccacctggtggaacgggctcctcctcagactcacctcccttctggggcatcttctgggacggggtctgcctcagccactcatggtgggggatccccccctggtactcgggggcctggggcctctgttcatgaccggaatgncaacagctatgtcatggttggaaccttcaatcttcctagtgacggctctgctgtggatgttcacatcaaccatggaacaggcccccgattcaaaantgagccccggntaacgggttggggatggttcacncangatcagggatatacagaactttaatatncccggatggaantgtcnaagaaaggncccnaaccgcaacaaaantnanccngctcccgnnagccnccgggntgtnaancccggaaaccagnaaccctttgaactncnnnaaanatn

SEQ ID NO: 285 - DNA, 907 bp, human
  misc_feature (584)..(584): n is a, c, g, or t
  misc_feature (667)..(667): n is a, c, g, or t
  misc_feature (674)..(674): n is a, c, g, or t
  misc_feature (717)..(717): n is a, c, g, or t
  misc_feature (732)..(732): n is a, c, g, or t
  misc_feature (743)..(743): n is a, c, g, or t
  misc_feature (751)..(751): n is a, c, g, or t
  misc_feature (773)..(773): n is a, c, g, or t
  misc_feature (778)..(778): n is a, c, g, or t
  misc_feature (782)..(782): n is a, c, g, or t
  misc_feature (784)..(784): n is a, c, g, or t
  misc_feature (792)..(792): n is a, c, g, or t
  misc_feature (804)..(805): n is a, c, g, or t
  misc_feature (807)..(808): n is a, c, g, or t
  misc_feature (824)..(824): n is a, c, g, or t
  misc_feature (826)..(826): n is a, c, g, or t
  misc_feature (834)..(834): n is a, c, g, or t
  misc_feature (836)..(836): n is a, c, g, or t
  misc_feature (838)..(838): n is a, c, g, or t
  misc_feature (864)..(864): n is a, c, g, or t
  misc_feature (873)..(874): n is a, c, g, or t
  misc_feature (877)..(877): n is a, c, g, or t
  misc_feature (880)..(880): n is a, c, g, or t
  misc_feature (884)..(884): n is a, c, g, or t
  misc_feature (889)..(889): n is a, c, g, or t
  misc_feature (892)..(892): n is a, c, g, or t
  misc_feature (896)..(896): n is a, c, g, or t
agagaaattactatgagaggatcgcatcaccatcaccatcacggatcctatttaggtgacactatagaatcgtcgacccacgcgtccgggggtcggtgcccccggcggcacggcgctggggaggcgatggcgccggccgcgtccaggctgcgggccgaagccgggctcggggcgctgccgcggcgggcgctcgcccagtacctgctcttcctgcggctctacccggtgctcaccaaggcggccaccagtggcattttgtcagcacttgggaacttcctggcccagatgattgagaagaagcggaaaaaagaaaactctagaagtctggatgtcggtgggcctctgagatatgccgtttacgggttcttcttcacagggccgctgagtcacttcttctacttcttcatggaacattggatccctcctgaggtccccctggcagggctcaggaggcttctcctggaccgcctcgtctttgcaccggccttcctcatgttgttcttcctcatcatgaactttctggaggggaaagacgcctcagccttcgccgccaagatgagggggggcttctggccggcgctgangatgaactggcgggtgtggaacgccactacagttcatcaacatcaactacgtccctctgaagttccgggtgctcttcgccaanctggcanctctgttctggtatgcctacctggcctccttggggaaatgacnaccgctgggaaaaanatcaagtgcantgtggacntgggtctgggggtctcaccccncccancganancaaaaacnatccatcagganntnnctgaatctaaaatcangngattcaanangncccaaaaatgatggaaaaaaaaaaanaaaaaatcnnttnaangtcnaaaanccngttnttttaaaaaaa

SEQ ID NO: 286 - DNA, 307 bp, human
  misc_feature (204)..(204): n is a, c, g, or t
  misc_feature (240)..(240): n is a, c, g, or t
  misc_feature (279)..(279): n is a, c, g, or t
  misc_feature (303)..(303): n is a, c, g, or t
gggggcgtttttgtggatgcaaagaaatttacaggaccccttctaccctagaggtccaagggaattcaggggtggctgcagggccccacgaagggacattgaagacattccttatgtgtagtgtccctggcaggcatttaccaggccatgtgctttaccgttacggtaatactttactttaggcatccctcctgttgctagcanccttttgacctatctgcatgcagtgttctcagtagnaatgttcctctgttacatggaaaaattgttgatggtgcnttgtaaattaaaaacccacttgcnaacc

SEQ ID NO: 287 - DNA, 442 bp, human
atagagaaaattactatgagaggatcgcatcaccatcaccatcacggatcctatttaggtgacactatagaatcgtcgacccacgcgtccggcgtgtttcactgctgcaccttctgctccagcgggggccagaaaaccgctcgctgcgcctgtggaggcaccatgccaggtgggtacctaggctgtggccatggacacaaaggccacccaggtcatccccactggtcatgctgtggaaaatttaatgagaaatctgaatgcacatggacaggtgggcagagcgcaccgaggagtctacttaggactgtggctctctgatgggtttgtgctcagccttttaaagctgcaggcagcaccacttgagatttccagaggacccagaccttcgttcattctaaagagactgatagaattaaaaacaaagtgccttatcttgcactgg

SEQ ID NO: 288 - DNA, 856 bp, human
  misc_feature (499)..(499): n is a, c, g, or t
  misc_feature (556)..(556): n is a, c, g, or t
  misc_feature (589)..(589): n is a, c, g, or t
  misc_feature (618)..(618): n is a, c, g, or t
  misc_feature (637)..(637): n is a, c, g, or t
  misc_feature (656)..(656): n is a, c, g, or t
  misc_feature (660)..(660): n is a, c, g, or t
  misc_feature (665)..(665): n is a, c, g, or t
  misc_feature (673)..(673): n is a, c, g, or t
  misc_feature (685)..(685): n is a, c, g, or t
  misc_feature (694)..(694): n is a, c, g, or t
  misc_feature (703)..(703): n is a, c, g, or t
  misc_feature (724)..(724): n is a, c, g, or t
  misc_feature (727)..(727): n is a, c, g, or t
  misc_feature (732)..(732): n is a, c, g, or t
  misc_feature (742)..(742): n is a, c, g, or t
  misc_feature (745)..(745): n is a, c, g, or t
  misc_feature (749)..(749): n is a, c, g, or t
  misc_feature (757)..(757): n is a, c, g, or t
  misc_feature (766)..(766): n is a, c, g, or t
  misc_feature (768)..(768): n is a, c, g, or t
  misc_feature (783)..(783): n is a, c, g, or t
  misc_feature (785)..(786): n is a, c, g, or t
  misc_feature (801)..(801): n is a, c, g, or t
  misc_feature (803)..(804): n is a, c, g, or t
  misc_feature (817)..(818): n is a, c, g, or t
  misc_feature (829)..(829): n is a, c, g, or t
  misc_feature (833)..(833): n is a, c, g, or t
  misc_feature (837)..(837): n is a, c, g, or t
  misc_feature (840)..(841): n is a, c, g, or t
  misc_feature (843)..(843): n is a, c, g, or t
  misc_feature (848)..(848): n is a, c, g, or t
  misc_feature (850)..(850): n is a, c, g, or t
  misc_feature (853)..(854): n is a, c, g, or t
  misc_feature (856)..(856): n is a, c, g, or t
atttagagaaaattacttatgagaggatcgcatcaccatcaccatcacggtatcctatttaggtgacactatagaatcgtcgacccacgcgtccgcgggagggcagggccgacggacggcgggcggcggcggcggtggcggcgctggagtcggcgcgggtgctggcgccatggaggccgagcggggtcccgagcgccggcctgcggagcgtagcagcccgggccagacgccggaggagggcgcgcaggccttggccgagttcgcggcgctgcacggcccggcgctgcgcgcttcgggggtccccgaacgttactggggccgcctcctgcacaagctggagcacgaggttttcgacgctggggaagtgtttgggatcatgcaagtggaggaggtagaagaggaggaggacgaggcagcccgggaggtgcggaagcagcagcccaacccggggaacgagctgtgctacaaggtcatcgtgaccagagagagcgggctccangcagcccaccccaacagcatcttcctcatcgaccacgcctggacgtgccgtgtggancatgcgcgccagcagctgcaacaggtgcccggnctgctgcaccgcatggccaacctgatggncattgatttccacggtganctgcccagtacataagctntggncctgntgctggangagatgtggaanttcaaccanacctactanctggcccatgggacagctganganaagangccggtgtgntanatcntggactanttcagttcncngatccatcaatccgnanntgcccaaacttcacnannccaaccttctttnnaaaattgccanaaancaanttnncntaacncnctnntn

SEQ ID NO: 289 - DNA, 1936 bp, human
atggaaccggcaatggaaccggaaaccctggaagcacgtattaatcgtgcaaccaacccgctgaataaagaactggattgggccagcattaatggtttttgcgaacagctgaacgaagattttgaaggtccgcctctggcaacccgtctgctggcacataaaattcagtctccgcaggaatgggaagcaattcaggcactgaccgttctggaaacctgtatgaaaagctgcggtaaacgttttcatgatgaagtgggcaaatttcgctttctgaacgaactgattaaagtggttagcccgaaatatctgggtagccgtaccagcgaaaaagtgaaaaataaaattctggaactgctgtatagctggaccgttggtctgccggaagaagttaaaattgccgaagcctatcagatgctgaaaaaacagggcattgtgaaaagcgatccgaaactgccggatgataccacctttccgctgcctccgcctcgtccgaaaaatgtgatcttcgaggatgaagagaaaagcaaaatgctggcacgtctgctgaaaagcagccatccggaagatctgcgtgcagccaataaactgatcaaagaaatggtgcaggaagatcagaaacgcatggaaaaaattagcaaacgcgtgaatgccattgaagaggtgaataacaatgtgaaactgctgaccgaaatggttatgagccatagccagggtggtgcagcagcaggtagcagcgaagatctgatgaaagaactgtatcagcgttgtgaacgtatgcgtccgaccctgtttcgtctggcaagcgataccgaagataatgatgaagcactggcagaaattctgcaggcaaatgataatctgacccaggtgatcaatctgtataaacagctggttcgtggtgaagaggttaatggtgatgcaaccgcaggtagcattccgggtagcaccagcgcactgctggatctgagcggtctggatctgcctccggcaggcaccacatatccggcaatgccgacccgtccgggtgaacaggcatctccggaacagccgagcgcaagcgttagcctgctggatgatgaactgatgagcctgggtctgagcgatccgacaccgcctagcggtccgagcctggatggcaccggttggaatagctttcagagcagtgatgccaccgaaccgcctgcaccagcactggcacaggcaccgagcatggaaagccgtccgcctgcacagaccagcctgcctgcaagctctggtctggatgatctggatctgctgggtaaaaccctgctgcaacagagcctgcctccggaaagccagcaggttcgttgggaaaaacagcagccgacaccgcgtctgaccctgcgtgatctgcagaataaaagcagcagctgtagcagcccgagcagcagcgcaaccagcctgctgcataccgtttcaccagaaccgcctcgtcctccgcagcagccggttccgaccgaactgagcctggcaagcattaccgttccgctggaaagcattaaaccgagcaatattctgccggttaccgtttatgatcagcatggctttcgcattctgtttcattttgcacgtgatccgctgcctggtcgttctgatgttctggttgttgttgttagcatgctgagcaccgcaccgcagccgattcgtaatattgtttttcagagcgcagttccgaaagttatgaaagttaaactgcagcctccgagcggtacagaactgcctgcatttaatccgattgttcatccgagcgcaattacccaggttctgctgctggcaaatccgcagaaagaaaaagttcgtctgcgctataaactgacctttaccatgggtgatcagacctacaatgaaatgggtgatgttgatcagtttccacctccagaaacctggggttcactgtaagcggccgcttaattaa

SEQ ID NO: 290 - DNA, 807 bp, human
  misc_feature (713)..(713): n is a, c, g, or t
tcgggatagagagaatactatgagaggtcgcatcccatcaccatcacggatcctatttaggtgacactatagaatcgtcgactctggaccttggctgtcactcagttgagacggccgcgcgcccgggaacccggcgcccacagagccgcggcaccatggcacctgctggacgcccgggggccaagaaggggattttggagcgcctggagagtggggaggttgtgattggagatggcagctttctcattactctggagaagagaggctatgtgaaggctgggctctggactccagaggcagtgatagaacacccagacgcagttcgtcaacttcacatggaattcttgagagcaggatcaaatgtcatgcagacttttaccttttctgccagtgaggacaatatggaaagcaaggggcttccatcgttggcgtgaactgccgctttgggcccgacaccagcttgaagacgatggagctcatgaaggagggtcttgagtgggcagggctgaaagcgcacctcatggtgcagcctctggggttccacgcgcctgactgtggcaaagaggggtttgtggatctcccagaatatccctttggactggagtccagagttgccaccagatgggatattcaaaaatacgccagagaggcctacaacctgggggtcaggtacattggcgggtgctgtggatttgagccctaccacatcaggncaattgcagaggagctggccccaaaaggggctttttgcaccagcttcaaaaaacacggcaactggggaagtggtttggaatgcacacaaaccct

SEQ ID NO: 291 - DNA, 1236 bp, human
  misc_feature (955)..(955): n is a, c, g, or t
  misc_feature (963)..(963): n is a, c, g, or t
  misc_feature (965)..(965): n is a, c, g, or t
  misc_feature (983)..(983): n is a, c, g, or t
  misc_feature (993)..(993): n is a, c, g, or t
  misc_feature (999)..(999): n is a, c, g, or t
  misc_feature (1007)..(1007): n is a, c, g, or t
  misc_feature (1021)..(1021): n is a, c, g, or t
  misc_feature (1036)..(1037): n is a, c, g, or t
  misc_feature (1061)..(1061): n is a, c, g, or t
  misc_feature (1070)..(1070): n is a, c, g, or t
  misc_feature (1075)..(1075): n is a, c, g, or t
  misc_feature (1078)..(1079): n is a, c, g, or t
  misc_feature (1084)..(1084): n is a, c, g, or t
  misc_feature (1089)..(1089): n is a, c, g, or t
  misc_feature (1096)..(1096): n is a, c, g, or t
  misc_feature (1100)..(1100): n is a, c, g, or t
  misc_feature (1109)..(1109): n is a, c, g, or t
  misc_feature (1116)..(1116): n is a, c, g, or t
  misc_feature (1127)..(1127): n is a, c, g, or t
  misc_feature (1132)..(1132): n is a, c, g, or t
  misc_feature (1135)..(1135): n is a, c, g, or t
  misc_feature (1145)..(1145): n is a, c, g, or t
  misc_feature (1150)..(1151): n is a, c, g, or t
  misc_feature (1154)..(1154): n is a, c, g, or t
  misc_feature (1158)..(1158): n is a, c, g, or t
  misc_feature (1162)..(1162): n is a, c, g, or t
  misc_feature (1166)..(1166): n is a, c, g, or t
  misc_feature (1170)..(1170): n is a, c, g, or t
  misc_feature (1172)..(1172): n is a, c, g, or t
  misc_feature (1192)..(1192): n is a, c, g, or t
  misc_feature (1212)..(1212): n is a, c, g, or t
  misc_feature (1217)..(1217): n is a, c, g, or t
  misc_feature (1222)..(1222): n is a, c, g, or t
tagagaaattactatgagaggatcgcatcaccatcaccatcacggatcctatttaggtgacactatagaatcgtcgacccacgcgtccgaaaccacattgtttacacaggcagcccatggaggacaggcatctctaatgaaaatatccgatagcaccttgaagactgtgccagccacctcacagctctcgaagcctggaaccacaatgctgagagtagcaggaggggttatcacaactgccacttcccctgccgtggccctctcagcaaacggtcctgcacaacagtctgaaggaatggctcccgtgtcttcatctacggtcagttctgtaacgaaaacttctgggcagcagcaagtgtgtgtgagccaggccaccgtgggaacctgcaaggctgccacccccaccgtcgtcagcgccacgtccctcgtgcctacaccaaaccccatctctgggaaagccacagtatccggactgttaaagattcactccagtcagtccagtccgcagcaggccgtcctgacgattcccagccagctcaaaccactcagcgtaaacacatctggaggggtgcagacgatcctgatgcctgtgaataaagtggttcagtcattttctaccagcaagccacctgccattctgcctgtagctgccccaactccagttgtccccagctctgctccagcagctgttgcaaaagtgaagactgaaccagaaacacctggaccgagttgcctctctcaggagggtcagacagcagtgaaaacagaagaaagttctgagctgggaaactatgtcattaagatagaccatttagaaactatccagcaactcctaactgcagtagtaaagaagattccattaatcactgcaaaaagtgaagatgccagctgcttttctgcaaagtctgtggagcagtactatggctggaacattggaaaaaggagagccgctgantggcaaanancaatgacaatgcgaaaangtcttacaanaaatcntggaaaanaatccgaaatttcnccccctgactccccnnaaaacaagcaaatcgctcactggngccgctgtnatggntannccccncggancctgaancctnaagaatganggggaantcccttcgagnaagtnttnaacccaaatngaaannaancccnaagngccntttntnttttcctttggtgaaaaccntggcgaaaatggagacctgnaaaantttcnaaaaggaacccaaa

SEQ ID NO: 292 - DNA, 824 bp, human
  misc_feature (691)..(691): n is a, c, g, or t
  misc_feature (734)..(734): n is a, c, g, or t
  misc_feature (737)..(737): n is a, c, g, or t
gaggagaattaactatgagaggatcgcatcaccatcaccatcacggatcctatttaggtgacactatagaatcgtcgacccacgcgtccggcaaaactgaacaggacctggcacttggaactgatgcagaaggacagaaggtgaaagattccatgcgagtactccttccagttctactcaacaaaaatcatgataattgtgataaaataagagcaattctactttatatcttcagtattaatggaactacggaagaaaatttggacaggttgatccagaatgtaaagatagaaaatgagagtgacatgattcgtaactggagttaccttggtgttcccattgttccccaatctcaacaaggcaaaccgttaagaaaggatcggtctgcagaagaaacttttcagctctctcggtggacaccttttatcaaagatattatggaggatgctattgataatagattagattcaaaagaatggccatattgttcccagtgtccagcagtatggaatggttcaggagctgtaagtgctcgccagaaacccagagctaattatttagaagaccgaaaaaatgggtcaaagctgattgtttttgtaattggagggatcacatactctgaagtgcgttgtgcttatgaagtttctcaggcacataaatcctgtgaagttattattggttctacacatgntttaacacccaaaaagctgttggatgatataaagatgctgaanaancccaaggataaagtctccttaattaaagatgaatagcgtttctttttggagggtttagagattcttactaatatgttgaactaaaat

SEQ ID NO: 293 - DNA, 905 bp, human
  misc_feature (873)..(873): n is a, c, g, or t
  misc_feature (903)..(903): n is a, c, g, or t
tactatgagaggtcgcatcaccatcaccatcacggatcctatttaggtgacactatagaatcgtcgactctggaccttggctgtcactcagttagcagcggggaggcccctgacagcatcacatggaagccatatgatgcagccgacctggaccccaccgagaaccccttcgacctgcttgacttcaaccagacgcagcctgagaggggcgacaacaacctcaccaggatcgtgggaggccaggaatgcaaggacggggagtgtccctggcaggccctgctcatcaatgaggaaaacgagggtttctgtggtggaaccattctgagcgagttctacatcctaacggcagcccactgcctctaccaagccaagagattcaaggtgagggtaggggaccggaacacggagcaggaggagggcggtgaggcggtgcacgaggtggaggtggtcatcaagcacaaccggttcacaaaggagacctatgacttcgacatcgccgtgctccggctcaagacccccatcaccttccgcatgaacgtggcgcctgcctgcctccccgagcgtgactgggccgagtccacgctgatgacgcagaagacggggattgtgagcggcttcgggcgcacccacgagaagggccggcagtccaccaggctcaagatgctggaggtgccctacgtggaccgcaacagctgcaagctgtccagcagcttcatcatcacccagaacatgttctgtgccggctacgacaccaagcaggatgatgcctgcccaggggaacagcggggcccgcacgtcacccgcttcaagacacctacttcgtgacggcatcgtcagctggggagaaggctgtgcccgtagggggagtacggnatctacaccaggtcaccgcttcctcagtgnat

SEQ ID NO: 294 - DNA, 1346 bp, human
  misc_feature (1241)..(1241): n is a, c, g, or t
ttagagaatactagagaggacgcatcaccatcaccatcacggtcgacccacgcgtccgcacgcagccaacatggctccagtggagcacgttgtggcggatgctggggctttcctgcggcatgcggctctgcaggacatcgggaagaacatttacaccatccgggaggtggtcactgagattcgggacaaggccacacgcaggcggctcgctgtcctgccctacgagctgcggttcaaggagcccttaccggaatacgtgcggctggtgactgagttttcaaagaaaacaggagactaccccagcctctctgccacggacatccaagtgcttgcactcacataccagttggaagcagagtttgttggggtgtctcacctaaaacaagaaccacagaaggttaaggtgagctcatcgattcagcacccagaaacacctctgcacatttctggtttccatctgccctacaagcctaaacccccacaagaaacagaaaaaggacactcagcttgtgagcctgagaacctggaatttagttccttcatgttctggagaaaccctttgcccaacatcgatcatgaactgcaggagctgctgattgacagaggtgaggacgttccaagtgaggaggaggaggaggaagaaaacgggtttgaagacagaaaagatgacagcgatgacgacgggggtggctggataacccccagtaacatcaagcagatccagcaggagctggagcagtgtgacgtccccgaggacgtgcaggttggctgcctgaccacaaacttcgccatgcaaaaagttctgctgcaaatggggctgcaccgggctggcgtgaaacgcatgcttaatcctgaaggccggagctacttcttgggctgcccgggttgttccaaaaaacctctgaaattaccccaatggttcgtccccctgggggaaaaaaaccctgaaaaaaagggccggaaccgtaaaaaaaaaaaggaccctggaaaaggtttttttcccgaaccccaagggggggaaacccccgggcccccgggaaatcttttcccccccccaagggggggaaaaaaagtataacccccctttctccgagggggaaggcgttctcccccggggggccccccccaagggggggaggaaaaaaaaaggggttcccccccaaaaatctccccgggggggggcccctttttaaaaaaaaaatttccaccccacctacccacttctgagcccgagaacaacnctctgaaagggggggagaacaatttcatacccccccccacaaaaatcttttacaaaaacaccacacccctcccccccccccaaaatatatggagcgtccctccat

SEQ ID NO: 295 - DNA, 965 bp, human
  misc_feature (154)..(154): n is a, c, g, or t
  misc_feature (349)..(349): n is a, c, g, or t
  misc_feature (637)..(637): n is a, c, g, or t
  misc_feature (748)..(748): n is a, c, g, or t
  misc_feature (832)..(832): n is a, c, g, or t
  misc_feature (855)..(855): n is a, c, g, or t
  misc_feature (865)..(865): n is a, c, g, or t
  misc_feature (881)..(881): n is a, c, g, or t
  misc_feature (891)..(891): n is a, c, g, or t
  misc_feature (896)..(896): n is a, c, g, or t
  misc_feature (900)..(900): n is a, c, g, or t
  misc_feature (910)..(910): n is a, c, g, or t
  misc_feature (919)..(919): n is a, c, g, or t
  misc_feature (926)..(926): n is a, c, g, or t
  misc_feature (931)..(932): n is a, c, g, or t
  misc_feature (938)..(938): n is a, c, g, or t
  misc_feature (941)..(941): n is a, c, g, or t
  misc_feature (944)..(946): n is a, c, g, or t
  misc_feature (950)..(950): n is a, c, g, or t
  misc_feature (959)..(960): n is a, c, g, or t
agagaaattactatgagaggatcgcatcaccatcaccatcacggatcctatttaggtgacactatagaatcgtcgacccacgcgtccgaccggatttggctgaatggccgggaggaggatgtggggcagccgcggctgcaggcctgcctgcggnagatccgctgcctggcccggaagcggaggaactcacgggatggggacccgctgccctccagcctcagctgcaaggtgcacgtggcatcggtgaacaacttccccacggctgcgggcctggcctcctcagcggcgggctatgcctgcctagcctacaccctggcccgtgtctacggcgtggagagtgacctctcanaagtggctcgccggggctcaggcagcgcctgccggagcctgtatgggggctttgtggagtggcagatgggagagcaggccgacgggaaggacagcatcgctcggcaagtggcccccgagtcacactggcctgaactccgcgtgctcatccttgtggtgagcgctgagaagaagctgacaggcagtaccgtgggcatgcgggccagtgtggagaccagccccctgcttcggttccgggccgagtccgtggtgcccgcgcgcatggcggagatggcccgctgcatccggnagcgagacttccccagcttcgcccagctgaccatgaaggacagcaaccagttccacgccacctgcctcgacaccttcccgcccatctcttacctcaatgccatctcctggngcatcatccacctggtgcaccgcttcaacgcccaccacggggacaccaaggtggcgtacaccttttgacgcgggccccaaatgnccgtgaattttcacccctggacnaaactgtggnttgaattttgtggctngttgtgtggnacggntttncccccaaggntcgaatggnaaaaacnttttnntgaaanggnctnnnaggnggaagcccnnccccc

SEQ ID NO: 296 - DNA, 980 bp, human
  misc_feature (5)..(5): n is a, c, g, or t
  misc_feature (8)..(8): n is a, c, g, or t
  misc_feature (881)..(881): n is a, c, g, or t
  misc_feature (919)..(919): n is a, c, g, or t
  misc_feature (947)..(947): n is a, c, g, or t
  misc_feature (961)..(961): n is a, c, g, or t
  misc_feature (965)..(965): n is a, c, g, or t
  misc_feature (977)..(977): n is a, c, g, or t
taganggnaaattactatgagaggatcgcatcaccatcaccatcacggatcctatttaggtgacactatagaatcgtcgacccacgcgtccgatcttgaaaagctagaggttgacttgaataagtctctgaaggaaaatacttttcttcaagagcagctagttgaactgaagatgctggcagaagaagataagcggaaggtttctgagttgactagcaagttgaaaaccacagatgaagaattccagagtttgaaatcttcacatgaaaaaagtaacaaaagcctagaggacaagagcttggaatttaaaaaactgtctgaggaactagcgattcagctagatatttgctgtaagaaaaccgaagccttattagaagctaaaacaaatgagctaatcaacattagtagtagtaaaactaatgccattctttctaggatttctcattgtcagcaccgtacaactaaagttaaggaggcactgttaattaaaacttgcacagtttctgaattagaagcacaacttagacagttgacagaggagcaaaatacactaaatatttcttttcaacaggctactcatcagttagaagaaaaagaaaatcaaattaagagcatgaaggctgatattgaaagtcttgtaacagaaaaagaagccttacagaaggaaggaggcaatcagcaacaggctgcttctgaaaaggagtcttgtataacacagttgaagaaagagttatctgaaaacatcaatgctgtcacattgatgaaagaagagcttaaagaaaaaaaagttgagattagcagtcttagtaaacaactaactgatttgaatgttcagcttcaaaatagcatcagcctatccgaaaaagaagcagccattttcntcactaagaaaagcagtatgatgaagaaaaatggtganttgctggatcagggggcaagatttatcnttttaaagttgacnctcntggagtaaaganaaa

SEQ ID NO: 297 - DNA, 812 bp, human
ctatgagaggatcgcatcaccatcaccatcacggatcctatttaggtgacactatagaatcgtcgacccacgcgtccggccagaagcagcctcaagatgcatctcctccgccaaaagaatgtgaccaaggaactctcagtgcatccctaaatccgagtaattcagagagtagtccttccagatgcccttcagacccagactccacctcccagccaaggtcaggggactctgcagatgtagctagagatgtaaagcaacccactgccacgccgaggagctaccggaacttcaggcatccagaaatagttggctactccgtaccaggacgaaatgggcaaagtcaagacctcgtcaaaggatgtgcaagaacagcccaggctccggaagacagaagtacagagccagatggcagtgaggcagaaggcaaccaggtctattttgctgtctacaccttcaaggcacgaaacccaaatgagctgagcgtgtcagccaatcagaaactcaagatcctcgagtttaaagatgttacaggaaatacagagtggtggttagctgaggttaacgggaagaagggctacgttccctccaattatatccgcaaaaccgagtacacctgagcccacgttgcctgccacccagccttgctgcctttgctttcagtccgccgagggttctggcggcccaccgagagggcgcctgctcctgagacacaggccctgtctgcgttgcttaaccatggcatggtggagcacaccacagatcttgttctcctcgattgggttgtaaaccttgatgctcactagaatctctag

SEQ ID NO: 298 - DNA, 1367 bp, human
  misc_feature (10)..(13): n is a, c, g, or t
  misc_feature (806)..(806): n is a, c, g, or t
  misc_feature (822)..(822): n is a, c, g, or t
  misc_feature (829)..(829): n is a, c, g, or t
  misc_feature (886)..(886): n is a, c, g, or t
  misc_feature (921)..(922): n is a, c, g, or t
ggggttcccnnnnctaagaatactagagaggatgcatcaccatcaccatcacggtcgacccacgcgtccgggcactgaaggtctcttggctgaaaaattggaggctttgatcactcagactcgagccaaacaggcagctaccatgagtgaagtggagtggagagggagaacggttccagtgaagattgacaaagtgcgcattttcttattaggactggctgataacgaagcagctattgtccaggctgaaagcgaagaaactaaggagcgcctgtttgaatcaatgctcagcgagtgtcgggacgccatccaggtggttcgggaggagctcaagccagatcagaaacagagagattatatccttgaaggagagccagggaaggtgtctaatcttcaatacttgcatagctacctgacttacatcaagctatcaacggcaatcaagcgtaatgagaacatggccaaaggtctgcagagggctctgctgcagcagcagccagaggatgacagcaagcgctcaccccggccccaggacctgatccgactctatgacatcatcttacagaatctggtggaattgctccagcttcctggtttagaggaagacaaagccttccagaaagagataggcctcaagactctggtgttcaaagcttacaggtgttttttcattgctcagtcctatgtgctggtgaagaagtggagcgaagcccttgtcctgtatgacagagtcctgaaatatgcaaatgaagtaaattctgatgctggcgccttcaagaacagcctaaaggacctgcctgatgtgncagagctcatcactcnagtgcgntcaaaagaagtgctccctgcaggccgcagccatccttgatgcaaacgacgctcatcnaacagagaactcctccctccaagtcaggacatagnnctctgggtgaaacgttttgaaatttcttgctggacccctcccttgtcccaagcaagccaaccttgtgacttccaccaggcttcagcccatccctgcaagcttttgtctttgactggcctcaacagggggcttcccacccttgaggacaattgggacgaaaacaagagggctcctgaaactccgggctctttggatcaggactccggcttcctcggggggggggaaattgtctccattcttttggaaaaccccccattctgaattatcccgtcttttgccccggagaatttaaccttccctcttctaaaaaaaaaaagggggcccccccgcaacccaattgatggcccctgtaaaaacaaaccccccctcgtttttaaccccgcccgcgtttttttaaaaaccctctgttttgctaaaaaaaaaaacaaatcccctttcccccaca

SEQ ID NO: 299 - DNA, 849 bp, human
  misc_feature (19)..(19): n is a, c, g, or t
  misc_feature (625)..(625): n is a, c, g, or t
  misc_feature (669)..(669): n is a, c, g, or t
  misc_feature (672)..(672): n is a, c, g, or t
  misc_feature (691)..(691): n is a, c, g, or t
  misc_feature (714)..(714): n is a, c, g, or t
  misc_feature (732)..(733): n is a, c, g, or t
  misc_feature (739)..(739): n is a, c, g, or t
  misc_feature (773)..(773): n is a, c, g, or t
  misc_feature (793)..(793): n is a, c, g, or t
  misc_feature (809)..(809): n is a, c, g, or t
  misc_feature (815)..(815): n is a, c, g, or t
  misc_feature (821)..(821): n is a, c, g, or t
  misc_feature (828)..(832): n is a, c, g, or t
  misc_feature (837)..(849): n is a, c, g, or t
ttattaaagaggagaaatnacttgagaggatcgcatcaccatcaccatcacggatcctatttaggtgacactatagaatcgtcgacccacgcgtccgcggacgcgtgggcagccccagacacggaccccgcaggagatgggtgcccccatccgcacactgtcctttggccaccggacatcatgcctcccaagaaggatgttcccgtgaagaaaccagcagggccctccatctccaaacctgctgctaagccagcagcagcaggggctcctccagccaagaccaaagctgagccagctgtcccccaggcccctcagaaaacccaggagcctccagtcgatctctccaaagtggtgatcgagtttaacaaggaccagctggaggagttcaaggaggccttcgagctgtttgaccgagtgggggatggcaagatcctgtacagccagtgtgggggacgtgatgagggccctgggccagaaccccaccaacgcccgaggtgctcaaggtcctggggaaccccaagagtgatgagctgaagtcgcgggcgtgtggactttgagacttttctgcccatgctcaaggcagtggccaagaaccgaggcccagggagagaagatgactgaggangaggggggagaccggtctggcaggacacgaagacagcaacgggntgnatcaactaccaaggccttntttgaaacacattcttaaacgtntgagtgcttgcaattcanngggggnccgggacactgggcccccgcaggcgaaaacacgnttccaacccccaggagggcncctattggtttaaaanaaaaantggggnttctccnnnnnaaaannnnnnnnnnnnn

SEQ ID NO: 300 - DNA, 1304 bp, human
  misc_feature (731)..(731): n is a, c, g, or t
  misc_feature (850)..(850): n is a, c, g, or t
accgctccttggcaaattctatgagggatgcatcccatcaccatcacggtcgacccacgcgtccgcccacgcgtccgggaaggggaagagaagtccagccgccaagcccagccttccccggcgcgcagccccgacggggccgcggcaggcgcggcgagagcgctgacggagccatgagagagtacaaagtggtggtgctgggctcgggcggcgtgggcaagtccgcgctcaccgtgcagttcgtgacgggctccttcatcgagaagtacgacccgaccatcgaagacttttaccgcaaggagattgaggtggactcgtcgccgtcggtgctggagatcctggatacggcgggcaccgagcagttcgcgtccatgcgggacctgtacatcaagaacggccagggcttcatcctggtctacagcctcgtcaaccagcagagcttccaggacatcaagcccatgcgggaccagatcatccgcgtgaagcggtacgagcgcgtgcccatgatcctggtgggcaacaaggtggacctggagggtgagcgcgaggtctcgtacggggagggcaaggccctggctgaggagtggagctgccccttcatggagacgtcggccaaaaacaaagcctcggtagacgagctatttgccgagatcgtgcggcagatgaactacgcggcgcagcccaacggcgatgagggctgctgctcggcctgcgtgatcctctgaggcggncaccgcgcgccggccgcgctctgcgcacaaaagccaaacgcatccgactctctaaatgtgatttatttcttgctttgagattggagaccactttgcattggccagggtgtcttgggagncccggctggcctccgccggccggcgtcccctgcctccaccccgtgccccaaggggggtggcccgctcctgccccacccaacactctgggggaaaagggggtcctttgcaccactgaagtttctcccaggatttcggctctagccttattcccccctctcaatagccacaacggggcgctcaccgcggatttcgactcccctcccactcaaaagttcaacccgcataaaaattggctgcccaatcccgtctttatctcgctcttaccctgcagacacatgatactccacttctccaccctagaaacctcctccttcctcctctgtaatctgagctactctacctcttctttcccacgccaccatcaaaagtctacatagtattcctccaataatcttaacgacacgcacatctccttatctccaccactagccctatacctcacctttacgatac

SEQ ID NO: 301 - DNA, 867 bp, human
  misc_feature (14)..(14): n is a, c, g, or t
  misc_feature (55)..(56): n is a, c, g, or t
  misc_feature (253)..(254): n is a, c, g, or t
  misc_feature (679)..(679): n is a, c, g, or t
  misc_feature (689)..(689): n is a, c, g, or t
  misc_feature (764)..(764): n is a, c, g, or t
  misc_feature (779)..(779): n is a, c, g, or t
  misc_feature (786)..(786): n is a, c, g, or t
  misc_feature (809)..(809): n is a, c, g, or t
  misc_feature (842)..(843): n is a, c, g, or t
  misc_feature (847)..(847): n is a, c, g, or t
ttattaaagaggantttttacttgagaggatcgcataccatcaccatcacggatnntatttaggtgacactatagaatcgtcgacccacgcgtccgcccacgcgtccgcaaaggtactccagcgtctcattcgctcccgggggaagtcacagatgaagcacctgaccgtacagatgatggcatatgataagctggttcagtgcccaccggagtcatttgatgtgattctggatgagaaccagctggaggatgnntgtgagcacctggctgagtacctggaggtttactggcgggccacgcaccacccagcccctggccccggacttctgggtcctcccagtgccatccccggacttcagaaccagcagctgctgggggagcgtggcgaggagcactccccccttgagcgggacagcttgatgccctctgatgaggccagcgagagctcccgccaagcctggacaggatcttcacagcgtagctcccgccacctggaggaggactatgcagatgcctaccaggacctgtaccagcctcaccgccaacacacctcggggctgcctagtgctaacgggcatgacccccaagaccggcttctagcccaggactcagaacacaaccacagtgaccggaactggcagcgcaaccggcccttggcccaaggatagctactgacagnctcctgctgncctaccctggcaggcacaggcgcagctggctgggggggcccactccaggcagggggggggttagactggcatcangctggcactaggctnagccccnaaaacccctggccaggccccagntttagggctgcctggggtcccaaggttttgggnnaaanaggggacccccctcacctcc

SEQ ID NO: 302 - DNA, 966 bp, human
taactatgagaggtcgcatcaccatcaccatcacggatcctatttaggtgacactatagaatcgtcgacccacgcgtccgcccacgcgtccgccgctgggcagcagacagtggagatcgacctcatcaagcctggcctcttcaaaggtacctatggcagccacggcctggagattgtgatgctcagcttccacggccggcgtgccaggggcaccaagatcacgggcgaccccaacatccccgacctcgagaaccagcgcaacttcaatgagctctcccgcatcgtcctggaggtgcgcgagagggtgcgccaggagcagcaggaaggcgggcacgaggcgggcgagggtcgtggccggcagggcccccgggagtcccagccaagccctgcccagcccagggcagaggcgcccagcaagggcccagatgggacacctggtgaggatggtggcgagcctggggatgccgtagctgcggccgagcagcctgcccagtgtgggcaggggcagccgttcgtgctgcccgtgggcgtgagctccaggaatgaggactacccccgaacctgcaggatgtgtttttatggcacaggcctcatcgcgggccacggcttcaccagccctgaacgcacccccggggtcttcatcctcttcgatgaggaccgcttcgggttcgtctggctggagctgaaatccttcagcctgtacagccgggtccaggccaccttccggaacgcagatgcgccgtccccacaggccttcgatgagatgctcaagaacattcagtccctcacctcctgaccggccacatccttgccgccacatcccgggtggctctggggctctgaactctgacctgtgaatagaagcagcatgcactttggaaatccggccttttgaccagaacgcacacctcgtcggggggcccagtccagccaccccccagcactttatgtagagagtgtgacata

SEQ ID NO: 303 - DNA, 976 bp, human
tgagaggtcgcatcaccatcaccatcacggatcctatttaggtgacactatagaatcgtcgacccacgcgtccgcccacgcgtccggggatgctcacgctgttgacttcagaggtagggatgctcctccatctgacttcaggggccggggcacttatgatttagattttagaggccgggatggatcccatgcagattttaggggaagggatttatcagatttggattttagggccagagaacagtcccgttctgattttaggaatagagatgtatctgatttggactttagagacaaagacggaacacaagtagactttagaggccgaggttcaggtactactgatctagactttagggacagggatacgccacattcagatttcagaggtagacaccgatctaggactgatcaggattttaggggcagagagatgggatcttgtatggaatttaaagatagggagatgccccctgtggatccaaatattttggattacattcagccctctacacaagatagagaacattctgcaagaacccaagagaagtgacagaggccaagcaagaattaataacctaccctcagcctcagaaaacatccataccagcaccattggaaaaacagcccaaccagcccctaagaccagctgataaggaacctgaacccaggaagagggaagaaggccaagagtcacgcttaggacatcaaaagagagaagcagaaaggtatctgcctccttctcgaagggaagggccaactttccgaagagaccgagagagggagtcatggtctggagagacacgccaggatggagagagcaaaactatcatgctaaagcgtatctatcgttccacaccacctgaggtgatagtggaagtgctggagccctatgtccgccttactactgccaacgtccgtatcatcaagaacagaacaggccctatggggcatacctatggctttattgacctcg

SEQ ID NO: 304 - DNA, 632 bp, human
  misc_feature (43)..(43): n is a, c, g, or t
  misc_feature (48)..(48): n is a, c, g, or t
  misc_feature (53)..(53): n is a, c, g, or t
tcggaaatataaaaaattatttgctttgtgagcggatacaatntaatngattnattgtgagcggataacaatttacacagaattcattaaagaggagaaattaactatgagaggatcgcatcaccatcaccatcacggatcctatttaggtgacactatagaatcgtcgacccacgcgtccgcaaggatggtggaggctttctgtgctacctggaagctgaccaacagtcagaactttgatgagtacatgaaggctctaggcgtgggctttgccactaggcaggtgggaaatgtgaccaaaccaacggtaattatcagtcaagaaggagacaaagtggtcatcaggactctcagcacattcaagaacacggagattagtttccagctgggagaagagtttgatgaaaccactgcagatgatagaaactgtaagtctgttgttagcctggatggagacaaacttgttcacatacagaaatgggatggcaaagaaacaaattttgtaagagaaattaaggatggcaaaatggttatgacccttacttttggtgatgtggttgctgttcgccactatgagaaggcataaaaatgttcctggtcggggcttggaagagctcttcagtttttctgtt

SEQ ID NO: 305 - DNA, 1105 bp, human
  misc_feature (805)..(805): n is a, c, g, or t
  misc_feature (825)..(825): n is a, c, g, or t
  misc_feature (849)..(849): n is a, c, g, or t
  misc_feature (912)..(912): n is a, c, g, or t
  misc_feature (931)..(931): n is a, c, g, or t
  misc_feature (948)..(948): n is a, c, g, or t
  misc_feature (966)..(966): n is a, c, g, or t
  misc_feature (971)..(972): n is a, c, g, or t
  misc_feature (980)..(980): n is a, c, g, or t
  misc_feature (987)..(987): n is a, c, g, or t
  misc_feature (998)..(998): n is a, c, g, or t
  misc_feature (1003)..(1003): n is a, c, g, or t
  misc_feature (1013)..(1013): n is a, c, g, or t
  misc_feature (1029)..(1029): n is a, c, g, or t
  misc_feature (1043)..(1043): n is a, c, g, or t
  misc_feature (1046)..(1046): n is a, c, g, or t
  misc_feature (1048)..(1048): n is a, c, g, or t
  misc_feature (1053)..(1054): n is a, c, g, or t
  misc_feature (1062)..(1062): n is a, c, g, or t
  misc_feature (1064)..(1064): n is a, c, g, or t
  misc_feature (1067)..(1067): n is a, c, g, or t
  misc_feature (1078)..(1078): n is a, c, g, or t
  misc_feature (1080)..(1080): n is a, c, g, or t
  misc_feature (1089)..(1089): n is a, c, g, or t
  misc_feature (1094)..(1094): n is a, c, g, or t
  misc_feature (1099)..(1099): n is a, c, g, or t
  misc_feature (1105)..(1105): n is a, c, g, or t
aattagagaaattactatgagaggatcgcatcaccatcaccatcacggatcctatttaggtgacactatagaatcgtcgacccacgcgtccgtgattcgtggccccgcagggaacaacgattgccgcatctacgtgggtaacttacctccagacatccgaaccaaggacattgaggacgtgttctacaaatacggcgctatccgcgacatcgacctcaagaatcgccgcgggggaccgcccttcgccttcgttgagttcgaggacccgcgagacgcggaagacgcggtgtatggtcgcgacggctatgattacgatgggtaccgtctgcgggtggagtttcctcgaagcggccgtggaacaggccgaggcggcggcgggggtggaggtggcggagctccccgaggtcgctatggccccccatccaggcggtctgaaaacagagtggttgtctctggactgcctccaagtggaagttggcaggatttaaaggatcacatgcgtgaagcaggtgatgtatgttatgctgatgtttaccgagatggcactggtgtcgtggagtttgtacggaaagaagatatgacctatgcagttcgaaaactggataacactaagtttagatctcatgagggagaaactgcctacatccgggttaaagttgatgggcccagaagtccaagttatggaagatctcgatctcgaagccgtagtcgtagcagaagccgtagcagaagcaacagcaggagtcgcagttactccccaaggagaagcagaggatcaccacgctattctcccccgtcatagcanatctcgctctcgtacataanatgattggtgacacttttttgtanaaacccatggttgtatacagtttttcctttattcagaacaatctttttcatttttttaattcnaaactgttttgttcaaaanggggctaaaagtgtttnaaattgccatttcttggnaatanncccccttngcttccnaaaaatctaanatttnccctttccgnggtcttttgaaaaaantggaatttttaaantgnangtccnnaaaaaggnantgntttaaaatttnanttaactccnaaacntcttncaaaan

SEQ ID NO: 306 - DNA, 1161 bp, human
  misc_feature (479)..(479): n is a, c, g, or t
  misc_feature (534)..(534): n is a, c, g, or t
  misc_feature (549)..(549): n is a, c, g, or t
  misc_feature (624)..(624): n is a, c, g, or t
  misc_feature (637)..(637): n is a, c, g, or t
  misc_feature (697)..(697): n is a, c, g, or t
  misc_feature (724)..(724): n is a, c, g, or t
  misc_feature (739)..(739): n is a, c, g, or t
  misc_feature (749)..(749): n is a, c, g, or t
  misc_feature (779)..(779): n is a, c, g, or t
  misc_feature (797)..(797): n is a, c, g, or t
  misc_feature (802)..(802): n is a, c, g, or t
  misc_feature (814)..(814): n is a, c, g, or t
  misc_feature (844)..(845): n is a, c, g, or t
  misc_feature (851)..(851): n is a, c, g, or t
  misc_feature (858)..(858): n is a, c, g, or t
  misc_feature (865)..(865): n is a, c, g, or t
  misc_feature (871)..(871): n is a, c, g, or t
  misc_feature (877)..(877): n is a, c, g, or t
  misc_feature (886)..(886): n is a, c, g, or t
  misc_feature (922)..(923): n is a, c, g, or t
  misc_feature (930)..(930): n is a, c, g, or t
  misc_feature (934)..(934): n is a, c, g, or t
  misc_feature (942)..(942): n is a, c, g, or t
  misc_feature (955)..(955): n is a, c, g, or t
  misc_feature (959)..(959): n is a, c, g, or t
  misc_feature (966)..(966): n is a, c, g, or t
  misc_feature (970)..(970): n is a, c, g, or t
  misc_feature (983)..(984): n is a, c, g, or t
  misc_feature (999)..(999): n is a, c, g, or t
  misc_feature (1004)..(1004): n is a, c, g, or t
  misc_feature (1015)..(1015): n is a, c, g, or t
  misc_feature (1019)..(1019): n is a, c, g, or t
  misc_feature (1024)..(1025): n is a, c, g, or t
  misc_feature (1028)..(1028): n is a, c, g, or t
  misc_feature (1036)..(1036): n is a, c, g, or t
  misc_feature (1040)..(1040): n is a, c, g, or t
  misc_feature (1048)..(1049): n is a, c, g, or t
  misc_feature (1061)..(1061): n is a, c, g, or t
  misc_feature (1066)..(1066): n is a, c, g, or t
  misc_feature (1074)..(1076): n is a, c, g, or t
  misc_feature (1084)..(1084): n is a, c, g, or t
  misc_feature (1112)..(1112): n is a, c, g, or t
  misc_feature (1126)..(1126): n is a, c, g, or t
  misc_feature (1132)..(1132): n is a, c, g, or t
  misc_feature (1141)..(1142): n is a, c, g, or t
  misc_feature (1158)..(1158): n is a, c, g, or t
  misc_feature (1161)..(1161): n is a, c, g, or t
agagaaaaattactgggagagggatcgcatcaccatcaccagtcacggatcctatttagggtgacacatatagaatcgctcgacccacgcgtccgatggttttgtggagtttgatgatctgcgtgatgcagatgatgctgtttatgaactgaatggcaaagacctttgtggtgagcgagtaattgttgagcatgcccgcggcccacggcgagatggcagttacggttctggacgcagtggatatggttatagaagaagtggccgagataaatatggccctcctactcgcacagagtacagacttattgtggagaatttgtcaagtcggtgcagctggcaagacctaaaggattatatgcgtcaggcaggagaagtgacttatgcagatgctcacaagggacgcaaaaatgaaggggtgattgaatttgtatcttattctgatatgaaaagagctttggaaaagttggatggaactgaantcaatgggagaaaaatcagattagttgaagacaagccaggttccagacgacgccngtcctactccaaaanccggagtcattcaaggtctcgctctcgaagcagacattcccgtaagagcagaagccgaagtggcagcagcaaaancagtcattctaanagtagatctcggtccaggtcgggctcccgctcccggagcaagagccggagccggagccanagtcggagccggagcaagaaagagaanaagcaggagccccancaaggacaanagccgcagccgcagccatagcgctggcaanagccgcagcaagagcaanaccangctgaaaagaanaatcccaaaaacaatgacaatgtcgggaannccatantcttgancccggancatganccaaangggggccancaaggagccggaaccaggaagccccatccaggaccnnaggaccnaganggaagggncgggaaaaataancccnaaaaggnaganccgcaatccccanntctccaacccgcaancaaanattgaacaagnaccnaaaannccnagggcccncaanccaaaacnncaaaggccgggnccccnccaaaaannnaaaaaaanggaaaaaccctgaacccctccccagttnccaaaatttccctncccccnccccgtgtnnaaaggaacccggaaanttn

SEQ ID NO: 307 - DNA, 1322 bp, human
  misc_feature (1237)..(1237): n is a, c, g, or t
  misc_feature (1246)..(1246): n is a, c, g, or t
  misc_feature (1248)..(1248): n is a, c, g, or t
  misc_feature (1257)..(1259): n is a, c, g, or t
cccctattcacgccctaagaatactatagaggatgcatcaccatcaccatcacggtcgacccacgcgtccggtggagccgagtgacaccattgagaatgtcaaggcaaagatccaagacaaggaaggcatccctcctgaccagcagaggttgatctttgccggaaaacagctggaagatggtcgtaccctgtctgactacaacatccagaaagagtccaccttgcacctggtgctccgtctcagaggtgggatgcagatcttcgtgaagaccctgactggtaagaccatcactctcgaggtggagccgagtgacaccattgagaatgtcaaggcaaagatccaagacaaggaaggcatccctcctgatcagcagaggttgatctttgctgggaaacagctggaagatggacgcaccctgtctgactacaacatccagaaagagtccaccctgcacctggtgccccgtcttagaggtgggatgcagatcttcgtgaagaccctgactggtaagaccatcactctcgaagtggagccgagtgacaccattgagaatgtcaaggcaaagatccaagacaaggaaggcatccctcctgaccagcagaggttgatctttgctgggaaacagctggaagatggacgcaccctgtctgactacaacatccagaaagagtccaccctgcacctggtgctccgtcttagaggtgggatgcagatcttcgtgaagaccctgactggtaagaccatcactctcgaagtggagccgagtgacaccattgagaatgtcaaggcaaagatccaagacaaggaaggcatccctcctgaccagcagaggttgatctttgctgggaaacagctgggagatggacgcaccctgtctgactacaacatccagaaagagtccaccctgcacctggtgctccgtctcagaagtgggatgcagatcttcgtgaagaccctgactggtagaccatcaccctcgaagtggagcccagtgacacatcgaaaatgtcaaggcaaagatccaagatagggaggcatcccctctgatcaacagaggttgatctttgctgggaacaactggaaagatggacgcccctgcctgattaaaaatccaaaaaaatccccctggcctggtctgccccttgaagggggggggtcaaattcccccttaaaggttcaccaaatttcttgcctttcttttcaaaagtggtggctccccaaaaaaaaaaaaaatcnaataaaagngngatcccccnnnggggggggcccaacccggggaacccaaataaagattggcccccggttaaaccccaaaacccca

SEQ ID NO: 308 - DNA, 802 bp, human
ctatgagaggatcgcatcaccatcaccatcacggatcctatttaggtgacactatagaatcgtcgacccacgcgtccgatgcaatgaaagttgtgaaaaaagagcttgttaatgatgatgaggatattgattgggtacagacagagaagcatgtgtttgagcaggcatccaatcatcctttccttgttgggctgcattcttgctttcagacagaaagcagattgttctttgttatagagtatgtaaatggaggagacctaatgtttcatatgcagcgacaaagaaaacttcctgaagaacatgccagattttactctgcagaaatcagtctagcattaaattatcttcatgagcgagggataatttatagagatttgaaactggacaatgtattactggactctgaaggccacattaaactcactgactacggcatgtgtaaggaaggattacggccaggagatacaaccagcactttctgtggtactcctaattacattgctcctgaaattttaagaggagaagattatggtttcagtgttgactggtgggctcttggagtgctcatgtttgagatgatggcaggaaggtctccatttgatattgttgggagctccgataaccctgaccagaacacagaggattatctcttccaagttattttggaaaaacaaattcgcataccacgttctctgtctgtaaaagctgcaagtgttctgaagagttttcttaataaggaccctaaggaacgattgggttgtcatcctcaacaaggatttgctgatattcagggacacccgtt

SEQ ID NO: 309 - DNA, 963 bp, human
  misc_feature (18)..(18): n is a, c, g, or t
  misc_feature (742)..(742): n is a, c, g, or t
  misc_feature (778)..(778): n is a, c, g, or t
  misc_feature (790)..(790): n is a, c, g, or t
  misc_feature (869)..(869): n is a, c, g, or t
  misc_feature (872)..(872): n is a, c, g, or t
  misc_feature (881)..(881): n is a, c, g, or t
  misc_feature (888)..(888): n is a, c, g, or t
  misc_feature (912)..(912): n is a, c, g, or t
  misc_feature (927)..(927): n is a, c, g, or t
  misc_feature (935)..(935): n is a, c, g, or t
  misc_feature (939)..(939): n is a, c, g, or t
  misc_feature (946)..(947): n is a, c, g, or t
  misc_feature (949)..(950): n is a, c, g, or t
  misc_feature (952)..(952): n is a, c, g, or t
  misc_feature (959)..(959): n is a, c, g, or t
  misc_feature (961)..(961): n is a, c, g, or t
aaaattagaggaaattanctatggagaggatcgcatcaccactcaccatcacggtatcctatttaggtgacacatatagaatcgtcgacccacgcgtccgacagccgcagcctcaccatcgctgagttcaagtgtaaactggagttgctggtgggcagccctgcttcctgcatggaactggagctgtatggagttgacgacaagttctacagcaagctggatcaagaggatgcgctcctgggctcctaccctgtagatgacggctgccgcatccacgtcattgaccacagtggcgcccgccttggtgagtatgaggacgtgtcccgggtggagaagtacacgatctcacaagaagcctacgaccagaggcaagacacggtccgctctttcctgaagcgcagcaagctcggccggtacaacgaggaggagcgggctcagcaggaggccgaggccgcccagcgcctggccgaggagaaggcccaggccagctccatccccgtgggcagccgctgtgaggtgcgggcggcgggacaatcccctcgccggggcaccgtcatgtatgtaggtctcacagatttcaagcctggctactggattggtgtccgctatgatgagccactggggaaaaatgatggcagtgtgaatgggaaacgctacttcgaatgccaggccaagtatggcgcctttgtcaagccagcagtcgtgacggtgggggacttcccggaggaggactacgggttgnacgagatatgacacctaaggaattcccctgcttcanctcctagctcanccactgactgccccttcctgtgtgtgccccatggccccttttctcctgaacccattttaattttattcatttttttccnttngccaattgnatttttnagaactcctgcatttaaattcacntaaaaacccccgaanaaaataanaaanaaaaaannannanataagananaa

SEQ ID NO: 310 - DNA, 820 bp, human
  misc_feature (729)..(729): n is a, c, g, or t
  misc_feature (766)..(766): n is a, c, g, or t
  misc_feature (769)..(769): n is a, c, g, or t
  misc_feature (779)..(779): n is a, c, g, or t
ctatgagaggatcgcatcaccatcaccatcacggatcctatttaggtgacactatagaatcgtcgacccacgcgtccgcggacgcgtgggcagaaatatgtgtaagactggacctcaatatgctatcagattctgaaaattcccagcatctggaacttcatgagccaccaaaagctgtggataaggcgaaatccccaggggttgatcctaagcagttggcagcagaactccagaaggtttcactacagcagtcaccgctggttctgtcatcagttgttgaaaaaggatctcatgttcattcaggtcctacatcagcaggatccagttccgttcccagccctgggcaaccagggtccccctcagtgagcaaaaagaagcacggcagcagcaagcctaccgatggaacaaaggttgtctctcatccaattacaggagaaattcagcttcaaattaactatgatcttggaaatctcataatacatattctccaagcaagaaatcttgttcctcgagacaacaatggttattctgacccttttgtgaaagtgtaccttcttccagggagaggtcaagtcatggttgtccagaatgcaagtgctgagtacaagagaaggactaaacatgtccagaaaagtcttaatcctgagtggaatcaaacagtaatttataaaagtatttccatgggaacagctcaagaagaaaacactgggaggtgacagtttgggattnatgatagattttcatccaacgacttcctttggggganggnattggattgnttttatctagcacaggctcacctcgataaaacctccaaggg

SEQ ID NO: 311 - DNA, 789 bp, human
  misc_feature (763)..(763): n is a, c, g, or t
  misc_feature (766)..(767): n is a, c, g, or t
  misc_feature (769)..(773): n is a, c, g, or t
  misc_feature (775)..(789): n is a, c, g, or t
tagagaaattactatgagaggatcgcatcaccatcaccatcacggatcctatttaggtgacactatagaatcgtcgacccacgcgtccggcgatgggctggggcagatgtccttggagttctaccagaagaagaagtctcgctggccattctcagacgagtgcatcccatgggaagtgtggacggtcaaggtgcatgtggtagccctggccacggagcaggagcggcagatctgccgggagaaggtgggtgagaaactctgcgagaagatcatcaacatcgtggaggtgatgaatcggcatgagtacttgcccaagatgcccacacagtcggaggtggataacgtgtttgacacaggcttgcgggacgtgcagccctacctgtacaagatctccttccagatcactgatgccctgggcacctcagtcaccaccaccatgcgcaggctcatcaaagacacccttgccctctgagcgtcgctggatctctgggagctccttgatggctcccagaccttggcttttgggaattgcacttttgggcctttgggctctggaacctgctctgggtcattggtgagacttggaaggggcagcccccgctggcttcttggttttgtggttgccagcctcaggtcatccttttaatctttgctgacggttcagtcctgcctctactgtctctccatagccctggtggggtcccccttctttctccactgtacagaagagccaccactgggatggggaataaagttgagaacntgnnannnnnannnnnnnnnnnnnnn

SEQ ID NO: 312 - DNA, 1051 bp, human
  misc_feature (750)..(750): n is a, c, g, or t
  misc_feature (794)..(794): n is a, c, g, or t
  misc_feature (817)..(818): n is a, c, g, or t
  misc_feature (840)..(840): n is a, c, g, or t
  misc_feature (848)..(848): n is a, c, g, or t
  misc_feature (862)..(862): n is a, c, g, or t
  misc_feature (864)..(864): n is a, c, g, or t
  misc_feature (877)..(878): n is a, c, g, or t
  misc_feature (892)..(893): n is a, c, g, or t
  misc_feature (896)..(896): n is a, c, g, or t
  misc_feature (905)..(905): n is a, c, g, or t
  misc_feature (917)..(917): n is a, c, g, or t
  misc_feature (920)..(920): n is a, c, g, or t
  misc_feature (930)..(930): n is a, c, g, or t
  misc_feature (935)..(935): n is a, c, g, or t
  misc_feature (946)..(946): n is a, c, g, or t
  misc_feature (954)..(954): n is a, c, g, or t
  misc_feature (964)..(965): n is a, c, g, or t
  misc_feature (971)..(971): n is a, c, g, or t
  misc_feature (977)..(977): n is a, c, g, or t
  misc_feature (985)..(986): n is a, c, g, or t
  misc_feature (993)..(994): n is a, c, g, or t
  misc_feature (999)..(999): n is a, c, g, or t
  misc_feature (1002)..(1002): n is a, c, g, or t
  misc_feature (1006)..(1007): n is a, c, g, or t
  misc_feature (1015)..(1016): n is a, c, g, or t
  misc_feature (1020)..(1020): n is a, c, g, or t
  misc_feature (1022)..(1022): n is a, c, g, or t
  misc_feature (1024)..(1024): n is a, c, g, or t
tagagaaattaactatgagaggatcgcatcaccatcaccatcacggatcctatttaggtgacactatagaatcgtcgacccacgcgtccggcggcggggccgagagcgtgactcgcccgctccgcgctgcttcccccgcgccgcctccccgcgccgctcgcgcagccatgtccgaggagaagcccaaggagggtgtgaagacagagaatgaccacatcaacctgaaggtggccgggcaggacggctccgtggtgcagttcaagatcaagaggcacacgccgctgagcaagctgatgaaggcctactgcgagaggcagggcttgtcaatgaggcagatcagattcaggttcgacgggcagccaatcaatgaaactgacactccagcacagctggagatggaggacgaggacaccatcgacgtgttccagcagcagacgggaggtgtgccggagagcagcctggcagggcacagtttctagagggcccgtccccagcccgggccgtccatcctcgcattgctgttgaatggtgagcacgtgaccatgccgaccacaaaggtgtctgcggaaactcgaggacattcaccacgatgattttcctctctttgatgtacttcaagtgcaactcaaaactatatctgcagggatgaatctgtaacttaaattgggccaatcagaattgttatctttgttcaggtaaaatgagttgcaagatattgtggggtacttttgtgtgctcatttgtgttttnccccccctcctacaacattttttttaacccccaaaaattatagncctgaaatgttttcgctttttanntctggccaaggggattttgacntccctgangttgggttggcctntnccccctggttcanntccagttaaaattnnaanaaatttggntgttttcccccnaangggggaattncaacnttttttggaanaaggttanttgggggggnnaaaagntttgtnaagggaannaaaaaanntgttnccntttnntttttaanngggnananggggggaatttaaaaatggcttaaaat

SEQ ID NO: 313 - DNA, 948 bp, human
  misc_feature (725)..(725): n is a, c, g, or t
  misc_feature (743)..(743): n is a, c, g, or t
  misc_feature (798)..(798): n is a, c, g, or t
  misc_feature (816)..(816): n is a, c, g, or t
  misc_feature (832)..(832): n is a, c, g, or t
  misc_feature (840)..(840): n is a, c, g, or t
  misc_feature (849)..(849): n is a, c, g, or t
  misc_feature (853)..(853): n is a, c, g, or t
  misc_feature (858)..(858): n is a, c, g, or t
  misc_feature (862)..(862): n is a, c, g, or t
  misc_feature (867)..(867): n is a, c, g, or t
  misc_feature (880)..(880): n is a, c, g, or t
  misc_feature (898)..(898): n is a, c, g, or t
  misc_feature (900)..(901): n is a, c, g, or t
  misc_feature (904)..(904): n is a, c, g, or t
  misc_feature (937)..(937): n is a, c, g, or t
gaatagagagattactatgagaggatcgcatcaccatcaccatcacggatcctatttaggtgacactatagaatcgtcgacccacgcgtccgggctcgatgtgacactgggtccggtaccggagatcggtggatctgaggcgccagcacctcagaacaaggaccagaaagctgttgatccagaagacgacttccagcgagagatgagtttctatcgccaagcccaggccgcagtgcttgcagtcttaccccgcctccatcagctcaaagtccctaccaagcgacccactgattattttgcggaaatggccaaatctgatctgcagatgcagaagattcgacagaagctgcagactaaacaggctgccatggagaggtctgaaaaagctaagcaactgcgagcacttaggaaatacgggaagaaggtgcaaacggaggttcttcagaagaggcagcaggagaaagcccatatgatgaatgctattaagaaatatcagaaaggcttctctgataaactggatttccttgagggagatcagaaacctctggcacagcacaagaaggcaggagccaaaggccagcagatgaggaaggggcccagtgctaaacgacggtataaaaaccagaagtttggttttggtggaaagaagaaaggctcaaagtggaacactcgggagagctatgatgatgtatctagcttccgggccaagacagctcatggcagangcctcaagaggcctggcnaagaaagggtcaaataagagacctggaaaacgaaccagagagaagatgaagaacngaacccccctaattagcntctttgaatacaaagnaacccaanaaaagggangaanactcnccantttcncgaccccactttngatccccttctggttggngnnctngttggaaaacatttcttttccattaaacttaangaaaaaatttt

SEQ ID NO: 314 - DNA, 948 bp, human
  misc_feature (733)..(733): n is a, c, g, or t
  misc_feature (762)..(762): n is a, c, g, or t
  misc_feature (787)..(787): n is a, c, g, or t
  misc_feature (809)..(809): n is a, c, g, or t
  misc_feature (828)..(828): n is a, c, g, or t
  misc_feature (837)..(837): n is a, c, g, or t
  misc_feature (865)..(865): n is a, c, g, or t
  misc_feature (895)..(895): n is a, c, g, or t
  misc_feature (899)..(899): n is a, c, g, or t
  misc_feature (906)..(906): n is a, c, g, or t
  misc_feature (915)..(915): n is a, c, g, or t
  misc_feature (925)..(925): n is a, c, g, or t
  misc_feature (936)..(937): n is a, c, g, or t
  misc_feature (939)..(939): n is a, c, g, or t
  misc_feature (944)..(944): n is a, c, g, or t
ttagagaaattactatgagaggatcgcatcaccatcaccatcacggatcctatttaggtgacactatagaatcgtcgacccacgcgtccgtggtgaagagcatcgaaggggatcagagactggtggagagagcccagcgcctggaccaggagcttctgcaggctctggagaaagaggagaagaggaacccgcaggtggtccaaaccagccctcgtcactccccacaccacgtggttaggtgggtagaccccacagccctgtgtgaggagcttctgcttccactggagaacccgtgtcagggcagggcccgcttgctgctcacaggcctccacgcctgtggggatctgagtgttgccttgctgagacacttctcctgctgtcctgaggtggtggccctggcctcagtgggctgctgctacatgaagctgagtgaccctggcggctacccactgagtcagtgggtggctgggctgcctggctatgaactgccctaccggcttcgggagggggcctgccatgccctggaggaatatgctgagcggctacagaaagctggccctggccttcgaactcactgctaccgtgcagcactggagacagtcatccgacgggcccggcccgagctccgtcggccaggcgtgcaggatatgtgcagcgggggctacagcgagtggggctagatccccagctgccactgaatctggctgcccttcaggcccacctggcccagganaaccgtgtggtggccttcttcagcctggntctactgcttgccccactggtgganacgcttattctactggaccggntgctgtaccttcaggaaanaggggtttnccatgctgagctcctgccccatcttcantcctgaaactctctccccaaaaaacctggntttntggtggnccacccaanaatgcccccntgggtcaaggnntnttttnttgt

SEQ ID NO: 315 - DNA, 1268 bp, human
  misc_feature (908)..(908): n is a, c, g, or t
  misc_feature (922)..(922): n is a, c, g, or t
  misc_feature (947)..(947): n is a, c, g, or t
  misc_feature (973)..(973): n is a, c, g, or t
  misc_feature (980)..(980): n is a, c, g, or t
  misc_feature (987)..(987): n is a, c, g, or t
  misc_feature (997)..(997): n is a, c, g, or t
  misc_feature (1010)..(1010): n is a, c, g, or t
  misc_feature (1016)..(1016): n is a, c, g, or t
  misc_feature (1021)..(1021): n is a, c, g, or t
  misc_feature (1023)..(1023): n is a, c, g, or t
  misc_feature (1040)..(1040): n is a, c, g, or t
  misc_feature (1051)..(1051): n is a, c, g, or t
  misc_feature (1056)..(1057): n is a, c, g, or t
  misc_feature (1079)..(1079): n is a, c, g, or t
  misc_feature (1101)..(1101): n is a, c, g, or t
  misc_feature (1114)..(1115): n is a, c, g, or t
  misc_feature (1127)..(1127): n is a, c, g, or t
  misc_feature (1129)..(1129): n is a, c, g, or t
  misc_feature (1139)..(1139): n is a, c, g, or t
  misc_feature (1142)..(1142): n is a, c, g, or t
  misc_feature (1155)..(1155): n is a, c, g, or t
  misc_feature (1157)..(1157): n is a, c, g, or t
  misc_feature (1161)..(1161): n is a, c, g, or t
  misc_feature (1168)..(1168): n is a, c, g, or t
  misc_feature (1191)..(1191): n is a, c, g, or t
  misc_feature (1194)..(1194): n is a, c, g, or t
  misc_feature (1197)..(1198): n is a, c, g, or t
  misc_feature (1200)..(1200): n is a, c, g, or t
  misc_feature (1203)..(1203): n is a, c, g, or t
  misc_feature (1207)..(1207): n is a, c, g, or t
  misc_feature (1211)..(1211): n is a, c, g, or t
  misc_feature (1215)..(1215): n is a, c, g, or t
  misc_feature (1220)..(1220): n is a, c, g, or t
  misc_feature (1226)..(1226): n is a, c, g, or t
  misc_feature (1231)..(1231): n is a, c, g, or t
  misc_feature (1237)..(1238): n is a, c, g, or t
  misc_feature (1249)..(1249): n is a, c, g, or t
  misc_feature (1258)..(1258): n is a, c, g, or t
  misc_feature (1264)..(1264): n is a, c, g, or t
tagagaaattactatgagaggatcgcatcaccatcaccatcacggatcctatttaggtgacactatagaatcgtcgacccacgcgtccggcccctccctgacctctgacctccaggcccagtccaaagggaatcctgagcagacacctgttctgaaacctgaggaagaggcccctgcgcctgaggtgggcgcctctaagcctgaggggatagactcaaggcctgagacccttcatccagggagacctcagcccccagcagaggaggagctgtgcagtgggaagcccttcgacgccttcaccgacctcaagaacggttccctctttgccttccgagggcagtactgctatgaactggacgaaaaggcagtgaggcctgggtaccccaagctcatccgagatgtctggggcatcgagggccccatcgatgccgccttcacccgcatcaactgtcaggggaagacctacctcttcaagggtagtcagtactggcgctttgaggatggtgtcctggaccctgattacccccgaaatatctctgacggcttcgatggcatcccggacaacgtggatgcagccttggccctccctgcccatagctacagtggccgggagcgggtctacttcttcaaggggaaacagtactgggagtaccagttccagcaccagcccagtcaggaggagtgtgaaggcagctccctgtcggctgtgtttgaacactttgccatgatgcagcgggacagctgggaggacatcttcgagcttctcttctggggcagaacctctgctggtaccagacagccccagttcattagccgggactggcacggtgtgccagggcaagtggacgcagccatggctggccgcatctacatctcaggcatggcaccccgccccctccttggccaanaaacaaaggtttangcatcgcaaccgcaaaggctaccgnttcacaacgaaggccacagccgtggnccgcaancaaaaantccggccggncattccgcgccangggggntgtcntngttctccatgaaggaancaacttggganccaannactatgatgactaccggaaggnatggcttgggcctgcccctgtnaacccatcccaanngtcttctttttntntgggaaaaantantaccgagtcattntncccncggggangggaaatgggaaccttcctaacnagnttnntnttnaaangggngggntcccnacttcnggccnttgtannaaaaaaaaccnatggggggncctttnaatc

SEQ ID NO: 316 - DNA, 1085 bp, human
  misc_feature (720)..(720): n is a, c, g, or t
  misc_feature (751)..(751): n is a, c, g, or t
  misc_feature (755)..(755): n is a, c, g, or t
  misc_feature (766)..(766): n is a, c, g, or t
  misc_feature (827)..(827): n is a, c, g, or t
  misc_feature (829)..(829): n is a, c, g, or t
  misc_feature (836)..(836): n is a, c, g, or t
  misc_feature (852)..(852): n is a, c, g, or t
  misc_feature (861)..(861): n is a, c, g, or t
  misc_feature (865)..(865): n is a, c, g, or t
  misc_feature (867)..(867): n is a, c, g, or t
  misc_feature (891)..(891): n is a, c, g, or t
  misc_feature (897)..(897): n is a, c, g, or t
  misc_feature (910)..(910): n is a, c, g, or t
  misc_feature (914)..(914): n is a, c, g, or t
  misc_feature (921)..(921): n is a, c, g, or t
  misc_feature (925)..(925): n is a, c, g, or t
  misc_feature (945)..(945): n is a, c, g, or t
  misc_feature (961)..(961): n is a, c, g, or t
  misc_feature (963)..(963): n is a, c, g, or t
  misc_feature (974)..(974): n is a, c, g, or t
  misc_feature (976)..(976): n is a, c, g, or t
  misc_feature (980)..(980): n is a, c, g, or t
  misc_feature (984)..(984): n is a, c, g, or t
  misc_feature (986)..(986): n is a, c, g, or t
  misc_feature (994)..(994): n is a, c, g, or t
  misc_feature (999)..(999): n is a, c, g, or t
  misc_feature (1004)..(1004): n is a, c, g, or t
  misc_feature (1007)..(1007): n is a, c, g, or t
  misc_feature (1011)..(1012): n is a, c, g, or t
  misc_feature (1023)..(1023): n is a, c, g, or t
  misc_feature (1029)..(1029): n is a, c, g, or t
  misc_feature (1036)..(1037): n is a, c, g, or t
  misc_feature (1048)..(1048): n is a, c, g, or t
  misc_feature (1052)..(1052): n is a, c, g, or t
  misc_feature (1057)..(1057): n is a, c, g, or t
  misc_feature (1061)..(1061): n is a, c, g, or t
  misc_feature (1073)..(1074): n is a, c, g, or t
  misc_feature (1082)..(1082): n is a, c, g, or t
  misc_feature (1085)..(1085): n is a, c, g, or t
gaatagagagattactatgagaggatcgcatcaccatcaccatcacggatcctatttaggtgacactatagaatcgtcgacccacgcgtccgcaggcatcacccctagcagcagcagcaggacccggacacctgcctctatcaatgctaccccagccaacatcaaccttgcagatctgacacgggctgtgaatgccctgcctcagaacatgacttcacagatgttcagtgccattgctgcggtgacaggccaaggacagaaccctaatgccaccccagcccagtgggcctccagccagtacggctatggcggcagtggaggcggcagcagtgcttaccacgtattcccaacgccagcccagcagccagtggccacaccactaatgacccctagctactcctacacgaccccaagccagcccatcaccacccctcagtaccaccagctccaggccagcaccaccccacagtcggcccaggcccagccccagccctcttccagctcccggcaacggcagcagcagccaaagtccaacagccatgcagccatcgactggggaaaaatggcggagcagtggctgcaggaaaaggaggcagaacggcggaaacagaagcagcggctgacacctcggccctcccccagccccatgatcgaaagcacccccatgtccattgctggcgatgccaccccactcctggacgagatggatcggtagggggnctgctcctcggactctggttacctctgaggntggnaaaaggcctgnctgcccactgcctccctccctgcccctccttttatgtccataaaagtggcgtgaaagtganangttctcntttggtggtcaaccgngatggggtnaaangnttggatggccttgtgaaacttgancttcanttgtatgctaggnaaanattcttnccgntcaaaccctccccgaaccanttgttcctggaaaccntnttggaaagggnantgtnggcnangaaggaanaaaanaaagntgnaaannaataaaaaaantttttnaatttcnnctccctaaaanccanttttnaaanttctgccctccnncggaattnttn

SEQ ID NO: 317 - DNA, 1278 bp, human
  misc_feature (960)..(960): n is a, c, g, or t
  misc_feature (980)..(980): n is a, c, g, or t
  misc_feature (983)..(983): n is a, c, g, or t
  misc_feature (991)..(991): n is a, c, g, or t
  misc_feature (1029)..(1029): n is a, c, g, or t
  misc_feature (1041)..(1041): n is a, c, g, or t
  misc_feature (1062)..(1062): n is a, c, g, or t
  misc_feature (1074)..(1074): n is a, c, g, or t
  misc_feature (1076)..(1078): n is a, c, g, or t
  misc_feature (1084)..(1084): n is a, c, g, or t
  misc_feature (1090)..(1090): n is a, c, g, or t
  misc_feature (1101)..(1101): n is a, c, g, or t
  misc_feature (1107)..(1107): n is a, c, g, or t
  misc_feature (1114)..(1114): n is a, c, g, or t
  misc_feature (1142)..(1143): n is a, c, g, or t
  misc_feature (1145)..(1145): n is a, c, g, or t
  misc_feature (1149)..(1149): n is a, c, g, or t
  misc_feature (1153)..(1153): n is a, c, g, or t
  misc_feature (1156)..(1156): n is a, c, g, or t
  misc_feature (1161)..(1161): n is a, c, g, or t
  misc_feature (1178)..(1178): n is a, c, g, or t
  misc_feature (1192)..(1192): n is a, c, g, or t
  misc_feature (1200)..(1200): n is a, c, g, or t
  misc_feature (1203)..(1203): n is a, c, g, or t
  misc_feature (1210)..(1210): n is a, c, g, or t
  misc_feature (1216)..(1216): n is a, c, g, or t
  misc_feature (1222)..(1222): n is a, c, g, or t
  misc_feature (1238)..(1238): n is a, c, g, or t
  misc_feature (1260)..(1260): n is a, c, g, or t
  misc_feature (1271)..(1271): n is a, c, g, or t
  misc_feature (1278)..(1278): n is a, c, g, or t
caatagagagattactatgagaggatcgcatcaccatcaccatcacggatcctatttaggtgacactatagaatcgtcgacccacgcgtccgggtacctgctctgcgaactggtgtctgacgacccccgctgccgcctaagcctcgatgaccgagttctgagcagcctcgtacgggacacgatcgccagggtgcacggaactttcggcgcagccgcctgctccatcggcttcgcgggtgcaagggcgctgggggaagaggggaacccgggaggatggcgggatgtggagggggcaggcgccggaggaagaaagaaggggcacgagtggccaagcccgtgcaccgttttttgtaaggtatctctttaagcgcctgggaccccaagcgagagtccgaaattagcagagcgctaaaaggaggggcccgaaggcagtggggctttgagctagaagcctctttttacctgcttgacaggtaatttctgtaattggttgtgattgaatttgatagggtagagaattaaatgagggaagctgtgtatacttcctagtaagagctattatatgaccgattacattaacatcatatggaaaaaaattgtcaaaagtactccgggaaagcccttaaatagttggtaaagtacagaacacatgattgtcaatatatgtaaatacaggatgagctaggacagaggggcccttctttcacaccacttaaattagttcccactttaaccttgtttgagattgacttctggagagttaaatgcagatagacttaactctcctaagtcaggtgagactgagagctgactgctacaataaattacggagcccaaatgcagtaaaacagcctgtttttcaggcaagggttttgtgggggttttttcctaaaattaaaacggatcgcctcctacctgctcctatttattgaattaactagtgaattaaaaagcatttcnattctaaattcattccccanttntgaatggngtgcaacacagtggggggtttggcttttccctttaacnccctgaaaaatntaagtgcccttgcctaaaaanatactttttggnannnaaatangccctnttaccccaaanttttcnttttttncaaaaaaatctgggctttttcccaagcnngntggnaggnccncaccnaaaacgggggtcattgntgcccccgcccccnggggttcnggnaattccngccccncccccngggggggggaaataanggggcccccccccccccctaanttttttttttntaaaaan

SEQ ID NO: 318 - DNA, 1317 bp, human
  misc_feature (827)..(827): n is a, c, g, or t
  misc_feature (858)..(858): n is a, c, g, or t
  misc_feature (898)..(898): n is a, c, g, or t
  misc_feature (906)..(906): n is a, c, g, or t
  misc_feature (920)..(920): n is a, c, g, or t
  misc_feature (936)..(936): n is a, c, g, or t
  misc_feature (939)..(939): n is a, c, g, or t
  misc_feature (960)..(960): n is a, c, g, or t
  misc_feature (971)..(971): n is a, c, g, or t
  misc_feature (979)..(979): n is a, c, g, or t
  misc_feature (981)..(982): n is a, c, g, or t
  misc_feature (988)..(988): n is a, c, g, or t
  misc_feature (991)..(991): n is a, c, g, or t
  misc_feature (1001)..(1001): n is a, c, g, or t
  misc_feature (1003)..(1003): n is a, c, g, or t
  misc_feature (1007)..(1007): n is a, c, g, or t
  misc_feature (1012)..(1012): n is a, c, g, or t
  misc_feature (1020)..(1020): n is a, c, g, or t
  misc_feature (1022)..(1022): n is a, c, g, or t
  misc_feature (1027)..(1027): n is a, c, g, or t
  misc_feature (1031)..(1031): n is a, c, g, or t
  misc_feature (1038)..(1038): n is a, c, g, or t
  misc_feature (1056)..(1056): n is a, c, g, or t
  misc_feature (1058)..(1058): n is a, c, g, or t
  misc_feature (1089)..(1089): n is a, c, g, or t
  misc_feature (1105)..(1105): n is a, c, g, or t
  misc_feature (1113)..(1113): n is a, c, g, or t
  misc_feature (1122)..(1122): n is a, c, g, or t
  misc_feature (1132)..(1132): n is a, c, g, or t
  misc_feature (1135)..(1135): n is a, c, g, or t
  misc_feature (1143)..(1144): n is a, c, g, or t
  misc_feature (1157)..(1157): n is a, c, g, or t
  misc_feature (1175)..(1175): n is a, c, g, or t
  misc_feature (1186)..(1186): n is a, c, g, or t
  misc_feature (1189)..(1190): n is a, c, g, or t
  misc_feature (1203)..(1203): n is a, c, g, or t
  misc_feature (1210)..(1210): n is a, c, g, or t
  misc_feature (1216)..(1216): n is a, c, g, or t
  misc_feature (1231)..(1231): n is a, c, g, or t
  misc_feature (1235)..(1236): n is a, c, g, or t
  misc_feature (1247)..(1247): n is a, c, g, or t
  misc_feature (1249)..(1249): n is a, c, g, or t
  misc_feature (1253)..(1253): n is a, c, g, or t
  misc_feature (1273)..(1273): n is a, c, g, or t
  misc_feature (1277)..(1277): n is a, c, g, or t
  misc_feature (1280)..(1281): n is a, c, g, or t
  misc_feature (1287)..(1287): n is a, c, g, or t
  misc_feature (1292)..(1292): n is a, c, g, or t
  misc_feature (1298)..(1298): n is a, c, g, or t
  misc_feature (1308)..(1309): n is a, c, g, or t
tagagaaattaactatgagaggatcgcatcaccatcaccatcacggatcctatttaggtgacactatagaatcgtcgacccacgcgtccgcttgtaaagctgttctcaacccactttgtcaggttgattatcgagcaaaactttgggcctgtaatttctgttttcaaagaaatcagtttcctccagcttatggaggcatatctgaggtgaatcaacctgccgaattgatgccccagttttctacaattgagtacgtgatacagcgaggtgctcagtcccctctgatctttctctatgtggttgacacatgcctggaggaagatgaccttcaagcactcaaagagtccctgcagatgtccctgagtcttcttcctccagatgctctggtgggtctgatcacatttggaaggatggtgcaggttcatgagctaagctgtgaaggaatctccaaaagttatgtcttccgagggaccaaggatttaactgcaaagcaaatacaggatatgttgggcctgaccaagccagccatgcccatgcagcaagcacgacctgcacaaccacaggagcacccttttgcttcaagcagatttctgcagcctgttcacaagattgatatgaacctcactgatcttcttggggagctacagagggacccatggccagtaactcaggggaagagacctttgcgatccactggtgtggctttgtccattgctgttggcttgctggagggcacttttccaaacacaggagccaggatcatgctgtttactggaggtccccctacccaagggcctggcatggtgggttggagatgaattaaagantcctattccgttcttggcatgataattgaanaaaaaataatgcacgattcatgaaaaaaggcaaccaagcncctatganatgcttgctaatcnaacagctgcaaatggnccnctgcaatgaaatttatgcttngggcccttgancaaaccgnanntttggnaangaaggttggncnaaanctaangggaggcnanatggnaaangggaaanttctttcaaaacctttcncncttcaagccaaaatttcccaaaaaaactttnataaagaattttaaanggaaattnccaaaaggnatttggggcnctntttggaannaaaacccccccgnaaataaaaattccggaancctttggcccnggnnaaattccaaaagnaaaaaanccgggnggtccaaaaaaaacntggnntttgggccaancnaganaaactggggccaaaaccccncccnccnngggccnttttngaggtncaccacccanncccccccc

SEQ ID NO: 319 - DNA, 1267 bp, human
  misc_feature (926)..(926): n is a, c, g, or t
  misc_feature (936)..(936): n is a, c, g, or t
  misc_feature (943)..(943): n is a, c, g, or t
  misc_feature (951)..(951): n is a, c, g, or t
  misc_feature (967)..(967): n is a, c, g, or t
  misc_feature (987)..(987): n is a, c, g, or t
  misc_feature (991)..(992): n is a, c, g, or t
  misc_feature (994)..(994): n is a, c, g, or t
  misc_feature (1011)..(1011): n is a, c, g, or t
  misc_feature (1027)..(1027): n is a, c, g, or t
  misc_feature (1032)..(1032): n is a, c, g, or t
  misc_feature (1041)..(1041): n is a, c, g, or t
  misc_feature (1045)..(1046): n is a, c, g, or t
  misc_feature (1052)..(1052): n is a, c, g, or t
  misc_feature (1058)..(1058): n is a, c, g, or t
  misc_feature (1072)..(1072): n is a, c, g, or t
  misc_feature (1082)..(1082): n is a, c, g, or t
  misc_feature (1089)..(1089): n is a, c, g, or t
  misc_feature (1097)..(1097): n is a, c, g, or t
  misc_feature (1113)..(1113): n is a, c, g, or t
  misc_feature (1115)..(1115): n is a, c, g, or t
  misc_feature (1149)..(1149): n is a, c, g, or t
  misc_feature (1157)..(1157): n is a, c, g, or t
  misc_feature (1159)..(1160): n is a, c, g, or t
  misc_feature (1170)..(1170): n is a, c, g, or t
  misc_feature (1183)..(1184): n is a, c, g, or t
  misc_feature (1187)..(1187): n is a, c, g, or t
  misc_feature (1196)..(1197): n is a, c, g, or t
  misc_feature (1210)..(1210): n is a, c, g, or t
  misc_feature (1215)..(1216): n is a, c, g, or t
  misc_feature (1222)..(1222): n is a, c, g, or t
  misc_feature (1231)..(1231): n is a, c, g, or t
  misc_feature (1237)..(1238): n is a, c, g, or t
  misc_feature (1240)..(1240): n is a, c, g, or t
  misc_feature (1243)..(1243): n is a, c, g, or t
  misc_feature (1248)..(1248): n is a, c, g, or t
  misc_feature (1252)..(1252): n is a, c, g, or t
  misc_feature (1257)..(1257): n is a, c, g, or t
  misc_feature (1261)..(1261): n is a, c, g, or t
  misc_feature (1267)..(1267): n is a, c, g, or t
tagagagaattactatgaagaggatcgcatcaccatcaccatcacggatcctatttaggtgacactatagaatcgtcgacccacgcgtccgggcccgggctcattcattccgcgccgggcctgccagacacctgcgcccttctgcagccgcccgccgcatccgccgccgcagcccccagcatgtcgggcccagacgtcgagacgccgtccgccatccagatctgccggatcatgcggccagatgatgccaacgtggccggcaatgtccacggggggaccatcctgaagatgatcgaggaggcaggcgccatcatcagcacccggcattgcaacagccagaacggggagcgctgtgtggccgccctggctcgtgtcgagcgcaccgacttcctgtctcccatgtgcatcggtgaggtggcgcatgtcagcgcggagatcacctacacctccaagcactctgtggaggtgcaggtcaacgtgatgtccgaaaacatcctcacaggtgccaaaaagctgaccaataaggccaccctgtggtatgtgcccctgtcgctgaagaatgtggacaaggtcctcgaggtgcctcctgttgtgtattcccggcaggagcaggaggaggagggccggaagcggtatgaagcccagaagctggagcgcatggagaccaagtggaggaacggggacatcgtccagccagtcctcaacccagagccgaacactgtcagctacagccagtccagcttgatccacctggtggggccttcagactgcaccctgcacggctttgtgcacggaggtgtgaccatgaagctcatggatgaagttcgccgggatcgtggctgcacgccactgcaagaccaacatcgtcacagcttccgtggaacgccatttaattttcatgacaaagatcaaaaaaaggctgcgtnattcaccatntcgggangcatgacnttcacgaacaaataanttccatgaaatatcaagttnttgnngnaaccccaaccttgttgnggaaactttcaaaaanccctnccggggccnccanngctttnttcacntaagtgttcttaanccaaaaaggnaggtccnttcctgtncccccatgttcaatcncnttaaaaattccccctttggccaaaacccattttnatttaaancnngggttttttnaaatttttctaannaangttaacctnnatttttttgtaancctannaccaantttttttanttcttnncntanaagtnaacnggttncccnaacccn

SEQ ID NO: 320 - DNA, 1127 bp, human
  misc_feature (873)..(873): n is a, c, g, or t
  misc_feature (902)..(902): n is a, c, g, or t
  misc_feature (911)..(911): n is a, c, g, or t
  misc_feature (914)..(914): n is a, c, g, or t
  misc_feature (918)..(918): n is a, c, g, or t
  misc_feature (926)..(926): n is a, c, g, or t
  misc_feature (937)..(937): n is a, c, g, or t
  misc_feature (949)..(949): n is a, c, g, or t
  misc_feature (954)..(954): n is a, c, g, or t
  misc_feature (979)..(979): n is a, c, g, or t
  misc_feature (981)..(981): n is a, c, g, or t
  misc_feature (997)..(997): n is a, c, g, or t
  misc_feature (1016)..(1016): n is a, c, g, or t
  misc_feature (1020)..(1020): n is a, c, g, or t
  misc_feature (1023)..(1023): n is a, c, g, or t
  misc_feature (1035)..(1035): n is a, c, g, or t
  misc_feature (1041)..(1041): n is a, c, g, or t
  misc_feature (1048)..(1048): n is a, c, g, or t
  misc_feature (1051)..(1051): n is a, c, g, or t
  misc_feature (1054)..(1054): n is a, c, g, or t
  misc_feature (1062)..(1062): n is a, c, g, or t
  misc_feature (1067)..(1067): n is a, c, g, or t
  misc_feature (1071)..(1071): n is a, c, g, or t
  misc_feature (1075)..(1075): n is a, c, g, or t
  misc_feature (1083)..(1083): n is a, c, g, or t
  misc_feature (1094)..(1094): n is a, c, g, or t
  misc_feature (1098)..(1099): n is a, c, g, or t
  misc_feature (1107)..(1107): n is a, c, g, or t
  misc_feature (1110)..(1110): n is a, c, g, or t
  misc_feature (1113)..(1113): n is a, c, g, or t
  misc_feature (1115)..(1116): n is a, c, g, or t
  misc_feature (1121)..(1121): n is a, c, g, or t
  misc_feature (1123)..(1125): n is a, c, g, or t
agagaattactatgagaggatcgcatcaccatcaccatcacggatcctatttaggtgacactatagaatcgtcgacccacgcgtccgtgcaggtagccggccggccgggggtcgcgggtatggccgaggccaggaagcggcgggagctacttcccctgatctaccaccatctgctgcgggctggctatgtgcgtgcggcgcgggaagtgaaggagcagagcggccagaagtgtttcctggctcagcccgtaacccttctggacatctatacacactggcaacaaacctcagagcttggtcggaagcggaaggcagaggaagatgcggcactgcaagctaagaaaacccgtgtgtcagaccccatcagcacctcggagagctcggaagaggaggaagaagcagaagccgaaaccgccaaagccaccccaagactagcatctaccaactcctcagtcctgggggcggacttgccatcaagcatgaaagaaaaagccaaggcagagacagagaaagctggcaagactgggaattccatgccacaccctgccactgggaagacggtggccaaccttctttctgggaagtctcccaggaagtcagcagagccctcagcaaatactacgttggtctcagaaactgaggaggagggcagcgtcccggcctttggagctgctgccaagcctgggatggtgtcagcgggccaggccgacagctccagcgaggacacctccagctccagtgatgagacagacgtggaggggaaaccctcagtaaaaccagcccaggtcaaagcctcatcagtttctactaaggagtctccagcaagaaaggcggccccagcccctgggaaggtgggggatgtgacaccccagntcaaaggaggggccctgcccccagccaanagggccaanaanccanaaaaggantcaaaaagtantgaggagggatntgaantgaggaggaggcccttgcagggacncnaaaccaggtaaaggcntctgaaaaattttcaggtnaaantgnctcacccctgcnaggganccctggnaanggntacccacnccccntggnaggnagggctgnaccttccaacnaggnnggaacccnagngantnnaaacncnnnag

SEQ ID NO: 321 - DNA, 1107 bp, human
  misc_feature (923)..(923): n is a, c, g, or t
  misc_feature (926)..(926): n is a, c, g, or t
  misc_feature (946)..(946): n is a, c, g, or t
  misc_feature (958)..(958): n is a, c, g, or t
  misc_feature (977)..(977): n is a, c, g, or t
  misc_feature (991)..(991): n is a, c, g, or t
  misc_feature (1001)..(1001): n is a, c, g, or t
  misc_feature (1011)..(1011): n is a, c, g, or t
  misc_feature (1023)..(1024): n is a, c, g, or t
  misc_feature (1040)..(1040): n is a, c, g, or t
  misc_feature (1045)..(1046): n is a, c, g, or t
  misc_feature (1055)..(1055): n is a, c, g, or t
  misc_feature (1057)..(1057): n is a, c, g, or t
  misc_feature (1072)..(1072): n is a, c, g, or t
  misc_feature (1074)..(1074): n is a, c, g, or t
  misc_feature (1077)..(1077): n is a, c, g, or t
  misc_feature (1080)..(1080): n is a, c, g, or t
  misc_feature (1085)..(1085): n is a, c, g, or t
  misc_feature (1090)..(1090): n is a, c, g, or t
  misc_feature (1092)..(1092): n is a, c, g, or t
  misc_feature (1097)..(1097): n is a, c, g, or t
tagagaaattactatgagaggatcgcatcaccatcaccatcacggatcctatttaggtgacactatagaatcgtcgacccacgcgtccggcacagaagtgattcaactcttccccgagaaaggaaatatgggaaagatcctccccgaatacctcagcaactggaccatggaaaaagtcagacgagagggggttaaggtgatgcccaatgctattgtgcaatccgttggagtcagcagtggcaagttacttatcaagctgaaagacggcaggaaggtagaaactgaccacatagtggcagctgtgggcctggagcccaatgttgagttggccaagactggtggcctggaaatagactcagattttggtggcttccgggtaaatgcagagctacaagcacgctctaacatctgggtggcaggagatgctgcatgcttctacgatataaagttgggaaggaggcgggtagagcaccatgatcacgctgttgtgagtggaagattggctggagaaaatatgactggagctgctaagccgtactggcatcagtcaatgttctggagtgatttgggccccgatgttggctatgaagctattggtcttgtggacagtagtttgcccacagttggtgtttttgcaaaagcaactgcacaagacaaccccaaatctgccacagagcagtcaggaactggtatccgatcagagagtgagacagagtccgaggcctcagaaattactattcctcccagcaccccggcagttccacaggctcccgtccagggggaggactacggcaaaggtgtcatcttctacctcagggacaaagtggtcgtggggattgtgctatggaacatctttaaccgaatgccaatagcaaggaagatcattaaggacggtgagcagcatgaagatctcattgaagtanccnaactatccacattcatgaanactgaagccccncagtggaattggcaacccnctgcaccccctganagaggtcaantgggtaagancattttttatcnncaaactttcctgggtngatgnnatgatcagncnttggaaatttcactntnagnaantctangtccnanggaanaatcgatctc

SEQ ID NO: 322 - DNA, 1210 bp, human
  misc_feature (1)..(1): n is a, c, g, or t
  misc_feature (782)..(782): n is a, c, g, or t
  misc_feature (901)..(901): n is a, c, g, or t
  misc_feature (917)..(917): n is a, c, g, or t
  misc_feature (919)..(919): n is a, c, g, or t
  misc_feature (953)..(953): n is a, c, g, or t
  misc_feature (971)..(971): n is a, c, g, or t
  misc_feature (990)..(990): n is a, c, g, or t
  misc_feature (1008)..(1008): n is a, c, g, or t
  misc_feature (1010)..(1010): n is a, c, g, or t
  misc_feature (1012)..(1012): n is a, c, g, or t
  misc_feature (1015)..(1015): n is a, c, g, or t
  misc_feature (1022)..(1022): n is a, c, g, or t
  misc_feature (1029)..(1029): n is a, c, g, or t
  misc_feature (1037)..(1037): n is a, c, g, or t
  misc_feature (1045)..(1045): n is a, c, g, or t
  misc_feature (1054)..(1054): n is a, c, g, or t
  misc_feature (1061)..(1061): n is a, c, g, or t
  misc_feature (1081)..(1081): n is a, c, g, or t
  misc_feature (1086)..(1086): n is a, c, g, or t
  misc_feature (1108)..(1108): n is a, c, g, or t
  misc_feature (1113)..(1113): n is a, c, g, or t
  misc_feature (1125)..(1125): n is a, c, g, or t
  misc_feature (1127)..(1128): n is a, c, g, or t
  misc_feature (1142)..(1142): n is a, c, g, or t
  misc_feature (1146)..(1146): n is a, c, g, or t
  misc_feature (1152)..(1152): n is a, c, g, or t
  misc_feature (1156)..(1156): n is a, c, g, or t
  misc_feature (1159)..(1159): n is a, c, g, or t
  misc_feature (1162)..(1162): n is a, c, g, or t
  misc_feature (1171)..(1171): n is a, c, g, or t
  misc_feature (1175)..(1175): n is a, c, g, or t
  misc_feature (1182)..(1182): n is a, c, g, or t
  misc_feature (1189)..(1189): n is a, c, g, or t
  misc_feature (1191)..(1191): n is a, c, g, or t
  misc_feature (1193)..(1193): n is a, c, g, or t
  misc_feature (1195)..(1195): n is a, c, g, or t
  misc_feature (1201)..(1201): n is a, c, g, or t
naatagagaaattactatgagaggatcgcatcaccatcaccatcacggatcctatttaggtgacactatagaatcgtcgacccacgcgtccgcccacgcgtccgcccacgcgtccgcaacgaggacgggggagtgcgactgcgtctcgggcagcatggccgagaagcggcacacacgggactccgaagcccagcggctccccgactccttcaaggacagccccagtaagggccttggaccttgcggatggattttggtggcgttctcattcttattcaccgttataactttcccaatctcaatatggatgtgcataaagattataaaagagtatgaaagagccatcatctttagattgggtcgcattttacaaggaggagccaaaggacctggtttgttttttattctgccatgcactgacagcttcatcaaagtggacatgagaactatttcatttgatattcctcctcaggagatcctcacaaaggattcagtgacaattagcgtggatggtgtggtctattaccgcgttcagaatgcaaccctggctgtggcaaatatcaccaacgctgactcagcaacccgtcttttggcacaaactactctgaggaatgttctgggcaccaagaatctttctcagatcctctctgacagagaagaaattgcacacaacatgcagtctactctggatgatgccactgatgcctggggaataaaggtggagcgtgtggaaattaaggatgtgaaactacctgtgcagctccagagagctatggctgcanaagcagaagcgtcccgcgaggcccgcgccaaggttattgcagccgaaggagaaatgaatgcatccagggctctgaaaaaaacctccatggtcatcactgaatctcctgcagcccttcanctccgaaaccctgcananactgaccaccattgctgctgaaaaaaactcaaanaattgtctttccctctgnccataaaaatgctgcaagnaatcataaggggcaaaanananccntctaagnctaatgnaaaaaatnacccctanccttccaancatgaantcgggggaccaaattaaccntttanctcaaaaaaaaaggggaagggnttttnttttttccaaangnncaattgggggggtncccnaaaggnaaancanttnaaaaaaaangggnaaaaaantttttancntngnaaaaancgaaaaaat

SEQ ID NO: 323 - DNA, 964 bp, human
  misc_feature (827)..(827): n is a, c, g, or t
  misc_feature (935)..(935): n is a, c, g, or t
  misc_feature (942)..(964): n is a, c, g, or t
gagaaattactatgagaggatcgcatcaccatcaccatcacggatcctatttaggtgacactatagaatcgtcgacccacgcgtccgcggacgcgtgggtggggccccgggcggcgttgaccatgacccagcagggcgcggcgctgcagaactacaacaacgagctggtcaagtgcatagaggagctgtgccagaagcgggaggagctgtgccggcagatccaggaggaggaggacgagaagcagcggctgcagaatgaggtgaggcagctgacagagaagctggcccgcgtcaacgagaacctggcacgcaagattgcctctcgcaacgagttcgaccggaccatcgcggagacggaggccgcctacctcaagatcctggagagctcccagactttgctcagcgttctcaagagggaagctgggaacctgaccaaggctacagccccagaccagaaaagtagcggcggcagggacagctgaccagaccacgggcagggcctgcctccgtgtgcccctcagctcagccccagcaagtgtgtgctcagagcatctttgttcttcacggcagcagctaccttccctcactgtctcaggtgccgagaggggcaggtgccagcctccactggcatcagtgacaagcccagggcacagcccacccgggggtcctcgcttcatgctcacacaggctatggggatggtgggctccaggtcagctctgcaaggggcttgtctctgtggcacccacactcctgccctgccagggaggctctggttgtctgagcaccatgggggccccctcaccttgtccctcctcagccagcagangcccagggcaagggacaggaggacaggggttctccttcaccacagaacccaaacctcaggtctcacccctgtggcctgtgattatgaataaagattatctttgtaaanaaaaaannnnnnnnnnnnnnnnnnnnnnn

SEQ ID NO: 324 - DNA, 856 bp, human
  misc_feature (786)..(786): n is a, c, g, or t
  misc_feature (804)..(804): n is a, c, g, or t
  misc_feature (816)..(816): n is a, c, g, or t
  misc_feature (822)..(822): n is a, c, g, or t
  misc_feature (829)..(829): n is a, c, g, or t
  misc_feature (848)..(848): n is a, c, g, or t
  misc_feature (851)..(851): n is a, c, g, or t
taagaggagaattaactatgagaggatcgcatcaccatcaccatcacggatcctatttaggtgacactatagaatcgtcgacccacgcgtccgatccccagcccgccgccatggccgcctacaaactggtgctgatccggcacggcgagagcgcatggaacctggagaaccgcttcagcggctggtacgacgccgacctgagcccggcgggccacgaggaggcgaagcgcggcgggcaggcgctacgagatgctggctatgagtttgacatctgcttcacctcagtgcagaagagagcgatccggaccctctggacagtgctagatgccattgatcagatgtggctgccagtggtgaggacttggcgcctcaatgagcggcactatggcggtctaaccggtctcaataaagcagaaactgctgcaaagcatggtgaggcccaggtgaagatctggaggcgctcctatgatgtcccaccacctccgatggagcccgaccatcctttctacagcaacatcagtaaggatcgcaggtatgcagacctcacagaagatcagctaccctcctgtgagagtctgaaggatactattgccagagctctgcccttctggaatgaagaaatagttccccagatcaaggaggggaaacgtgtactgattgcagcccatggcaacagcctccggggcattgtcaagcatctggagggtctctctgaagaggctatcatggagctgaacctgccgactggtattcccatttgtctatgaattggacaagaacttgaancctatcaagcccatgcanttttctgggggnatgaanagacggngcccaaagccatggaaagntgnggctg

SEQ ID NO: 325 - DNA, 573 bp, human
  misc_feature (571)..(571): n is a, c, g, or t
  misc_feature (573)..(573): n is a, c, g, or t
atagagaaattactatgagaggatcgcatcaccatcaccatcacggatcctatttaggtgacactatagaatcgtcgacccacgcgtccggctgggaccgccgttcagtcgccaatatgcagctctttgtccgcgcccaggagctacacaccttcgaggtgaccggccaggaaacggtcgcccagatcaaggctcatgtagcctcactggagggcattgccccggaagatcaagtcgtgctcctggcaggcgcgcccctggaggatgaggccactctgggccagtgcggggtggaggccctgactaccctggaagtagcaggccgcatgcttggaggtaaagtccatggttccctggcccgtgctggaaaagtgagaggtcagactcctaaggtggccaaacaggagaagaagaagaagaagacaggtcgggctaagcggcggatgcagtacaaccggcgctttgtcaacgttgtgcccacctttggcaagaagaagggccccaatgccaactcttaagtcttttgtaattctggctttctctaataaaaaagccacttagttcagtcaanan

SEQ ID NO: 326 - DNA, 1253 bp, human
  misc_feature (945)..(945): n is a, c, g, or t
  misc_feature (957)..(957): n is a, c, g, or t
  misc_feature (962)..(962): n is a, c, g, or t
  misc_feature (983)..(983): n is a, c, g, or t
  misc_feature (1008)..(1008): n is a, c, g, or t
  misc_feature (1012)..(1012): n is a, c, g, or t
  misc_feature (1018)..(1018): n is a, c, g, or t
  misc_feature (1021)..(1021): n is a, c, g, or t
  misc_feature (1030)..(1031): n is a, c, g, or t
  misc_feature (1040)..(1040): n is a, c, g, or t
  misc_feature (1042)..(1042): n is a, c, g, or t
  misc_feature (1053)..(1053): n is a, c, g, or t
  misc_feature (1065)..(1065): n is a, c, g, or t
  misc_feature (1095)..(1095): n is a, c, g, or t
  misc_feature (1124)..(1124): n is a, c, g, or t
  misc_feature (1130)..(1130): n is a, c, g, or t
  misc_feature (1140)..(1140): n is a, c, g, or t
  misc_feature (1144)..(1144): n is a, c, g, or t
  misc_feature (1146)..(1146): n is a, c, g, or t
  misc_feature (1151)..(1151): n is a, c, g, or t
  misc_feature (1154)..(1154): n is a, c, g, or t
  misc_feature (1158)..(1159): n is a, c, g, or t
  misc_feature (1161)..(1161): n is a, c, g, or t
  misc_feature (1175)..(1175): n is a, c, g, or t
  misc_feature (1185)..(1185): n is a, c, g, or t
  misc_feature (1195)..(1195): n is a, c, g, or t
  misc_feature (1203)..(1204): n is a, c, g, or t
  misc_feature (1206)..(1206): n is a, c, g, or t
  misc_feature (1220)..(1221): n is a, c, g, or t
  misc_feature (1230)..(1230): n is a, c, g, or t
  misc_feature (1244)..(1244): n is a, c, g, or t
  misc_feature (1250)..(1250): n is a, c, g, or t
  misc_feature (1252)..(1253): n is a, c, g, or t
aatagagagattactatgagaggatcgcatcaccatcaccatcacggatcctatttaggtgacactatagaatcgtcgacccacgcgtccgcggacgcgtgggctcgaaaagataaagaccaaaggaagcaacaggcaatgtggcgagtgccctctgatttaaagatgctaaaaagactcaaaactcaaatggccgaagttcgatgtatgaaaactgatgtaaagaatacactttcagaaataaaaagcagcagtgctgcttctggagacatgcagacaagccttttttctgctgaccaggcagctctggctgcatgtggaactgaaaactctggcagattgcaggatttgggaatggaactcctggcaaagtcatcagttgccaattgttacatacgaaactccacaaataagaagagtaattcgcccaagccagctcgatccagtgtagcaggtagtctatcacttcgaagagcagtggaccctggagaaaatagtcgttcaaagggagactgtcagactctgtctgaaggctccccaggaagctctcagtctgggagcaggcacagttctccccgagccttgatacatggcagtatcggtgatattctgccaaaaactgaagaccggcagtgtaaagctttggattcagatgctgttgtggttgcagttttcagtggcttgcctgcggttgagaaaaggaggaaaatggtcaccttgggggctaatgctaaaggaggtcatctggaaggactgcagatgactgatttggaaaataattctgaaactggagagttacagcctgtactacctgaaggagcttcagctgcccctgaagaaggaatgagtagcgacagtgacattgaatgtgacactgagaatgaggagcaggaagagcataccagtgtgggcgggtttcccgactccttcatggtcatgacacanccccggatgaanatacncattccagttttcctgatggngaacaaataggccctgaaaatctcncctncatacngantgaaaaaannggaaggtantngccaaatcaanaaactgacttgncaagctaccttgaccctgaatttgctgaantggggcccaaattgtctccgccaaaaacnaaattnggcctttttnttcntntcccnccngaannanaatttgaaacggtnggagggggcncttttttctnaaaccccnntnttcctgggaaaacnnttgggaaantttttttatgggangaaaanann

SEQ ID NO: 327 - DNA, 1325 bp, human
  misc_feature (894)..(894): n is a, c, g, or t
  misc_feature (952)..(952): n is a, c, g, or t
  misc_feature (956)..(956): n is a, c, g, or t
  misc_feature (958)..(958): n is a, c, g, or t
  misc_feature (1000)..(1000): n is a, c, g, or t
  misc_feature (1002)..(1002): n is a, c, g, or t
  misc_feature (1024)..(1024): n is a, c, g, or t
  misc_feature (1037)..(1037): n is a, c, g, or t
  misc_feature (1048)..(1048): n is a, c, g, or t
  misc_feature (1070)..(1070): n is a, c, g, or t
  misc_feature (1082)..(1082): n is a, c, g, or t
  misc_feature (1098)..(1098): n is a, c, g, or t
  misc_feature (1108)..(1110): n is a, c, g, or t
  misc_feature (1116)..(1116): n is a, c, g, or t
  misc_feature (1120)..(1120): n is a, c, g, or t
  misc_feature (1132)..(1132): n is a, c, g, or t
  misc_feature (1134)..(1134): n is a, c, g, or t
  misc_feature (1144)..(1144): n is a, c, g, or t
  misc_feature (1146)..(1146): n is a, c, g, or t
  misc_feature (1155)..(1155): n is a, c, g, or t
  misc_feature (1160)..(1160): n is a, c, g, or t
  misc_feature (1166)..(1166): n is a, c, g, or t
  misc_feature (1169)..(1169): n is a, c, g, or t
  misc_feature (1182)..(1182): n is a, c, g, or t
  misc_feature (1184)..(1184): n is a, c, g, or t
  misc_feature (1194)..(1194): n is a, c, g, or t
  misc_feature (1206)..(1206): n is a, c, g, or t
  misc_feature (1211)..(1211): n is a, c, g, or t
  misc_feature (1213)..(1213): n is a, c, g, or t
  misc_feature (1216)..(1216): n is a, c, g, or t
  misc_feature (1223)..(1223): n is a, c, g, or t
  misc_feature (1227)..(1227): n is a, c, g, or t
  misc_feature (1231)..(1231): n is a, c, g, or t
  misc_feature (1236)..(1236): n is a, c, g, or t
  misc_feature (1249)..(1249): n is a, c, g, or t
  misc_feature (1254)..(1255): n is a, c, g, or t
  misc_feature (1257)..(1257): n is a, c, g, or t
  misc_feature (1278)..(1278): n is a, c, g, or t
  misc_feature (1296)..(1296): n is a, c, g, or t
  misc_feature (1302)..(1302): n is a, c, g, or t
  misc_feature (1304)..(1304): n is a, c, g, or t
  misc_feature (1307)..(1307): n is a, c, g, or t
  misc_feature (1310)..(1310): n is a, c, g, or t
  misc_feature (1316)..(1318): n is a, c, g, or t
attagagagaattactatgagaggatcgcatcaccatcaccatcacggatcctatttaggtgacactatagaatcgtcgacccacgcgtccgtggagtccgtcagttgctccgctgctgctgtcaggaccggagacatggagtcccagcgggacctgagcctggtgcctgagcggcttcagagacgcgaacaagaacggcagctggaagttgaaaggcggaaacaaaagcggcagaaccaggaggtagagaaggagaacagccactttttcgtcgccacctttgctcgggagcgagcggccgtggaagagcttctggagcgcgcggagtcggtcgagcggctggaggaggcggcctctcggctccaggggctgcagaaactaatcaacgactcagtttttttcctagccgcttacgacctgcggcagggacaagaggcgctggcgcggctgcaggcggccttggccgagcggcgccgggggctgcagcccaagaagcgtttcgctttcaagacccggggaaaggatgctgcttcgtctaccaaagtagacgcggctcctggcatccccccggcagttgaaagcatacaggactccccgctgcccaagaaggcggaaggagacctcggccccagctgggtctgcggtttctccaacctggagtcccaagtcttggagaagagagccagcgagttgcaccagcgcgacgttcttttgaccgaactgagcaactgcacggtcagactgtatggaaatcccaacaccctgcggctaaccaaggcccacagctgcaagctgctctgcggtccggtgtctacctctgttttcctggaggactgcagtgactgcgtgctggcagtggcctgccaacagctccgcatacacagtacgaaaanacacccgcatcttccttgcaggtgaccagcagggccatcgtggaagactgcagtgggnatcnanttccccccttacacctggagctacccgagatcgaaaggactncnaagctctggtttaaatagaacnaaaataactggancgatgttgaanatttaactggctggcccggaanatggcctccccnaactggaatattttcntgaaaaagannnaaaatnccangggaataaccantntcccctgttntncctcctacnaaaanttttcncgntggaattttcccntnttgggccccnaaattatttatntcccncnggnttttttncccntttnaggcnaaaaatgaagggnccccnntnaatttcctaaattccaaaggnaaaaaaaaaaatttttantttttngnctnaanaaaaannnccccccc

SEQ ID NO: 328 - DNA, 877 bp, human
gagaggatcgcatcaccatcaccatcacggatcctatttaggtgacactatagaatcgtcgacccacgcgtccgctgaagcaggcgctcttggctcggcgcggcccgctgcaatccgtggaggaacgcgccgccgagccaccatcatgcctgggcacttacaggaaggcttcggctgcgtggtcaccaaccgattcgaccagttatttgacgacgaatcggaccccttcgaggtgctgaaggcagcagagaacaagaaaaaagaagccggcgggggcggcgttgggggccctggggccaagagcgcagctcaggccgcggcccagaccaactccaacgcggcaggcaaacagctgcgcaaggagtcccagaaagaccgcaagaacccgctgccccccagcgttggcgtggttgacaagaaagaggagacgcagccgcccgtggcgcttaagaaagaaggaataagacgagttggaagaagacctgatcaacaacttcagggtgaagggaaaataattgatagaagaccagaaaggcgaccacctcgtgaacgaagattcgaaaagccacttgaagaaaagggtgaaggaggcgaattttcagttgatagaccgattattgaccgacctattcgaggtcgtggtggtcttggaagaggtcgagggggccgtggacgtggaatgggccgaggagatggatttgattctcgtggcaaacgtgaatttgataggcatagtggaagtgatagatctggcctgaagcacgaggacaaacgtggaggtagcggatctcacaactggggaactgtcaaagacgaattaacagagtcccccaaatacattcagaaacaaatatcttataattacagtgacttggat

SEQ ID NO: 329 - DNA, 1176 bp, human
  misc_feature (742)..(742): n is a, c, g, or t
  misc_feature (759)..(759): n is a, c, g, or t
  misc_feature (813)..(813): n is a, c, g, or t
  misc_feature (833)..(833): n is a, c, g, or t
  misc_feature (840)..(841): n is a, c, g, or t
  misc_feature (853)..(853): n is a, c, g, or t
  misc_feature (859)..(859): n is a, c, g, or t
  misc_feature (861)..(861): n is a, c, g, or t
  misc_feature (891)..(891): n is a, c, g, or t
  misc_feature (907)..(908): n is a, c, g, or t
  misc_feature (910)..(910): n is a, c, g, or t
  misc_feature (914)..(914): n is a, c, g, or t
  misc_feature (936)..(936): n is a, c, g, or t
  misc_feature (941)..(943): n is a, c, g, or t
  misc_feature (951)..(951): n is a, c, g, or t
  misc_feature (962)..(962): n is a, c, g, or t
  misc_feature (971)..(971): n is a, c, g, or t
  misc_feature (974)..(974): n is a, c, g, or t
  misc_feature (983)..(984): n is a, c, g, or t
  misc_feature (992)..(992): n is a, c, g, or t
  misc_feature (994)..(994): n is a, c, g, or t
  misc_feature (1006)..(1006): n is a, c, g, or t
  misc_feature (1009)..(1009): n is a, c, g, or t
  misc_feature (1020)..(1020): n is a, c, g, or t
  misc_feature (1027)..(1027): n is a, c, g, or t
  misc_feature (1036)..(1036): n is a, c, g, or t
  misc_feature (1073)..(1074): n is a, c, g, or t
  misc_feature (1091)..(1091): n is a, c, g, or t
  misc_feature (1100)..(1100): n is a, c, g, or t
  misc_feature (1107)..(1107): n is a, c, g, or t
  misc_feature (1114)..(1114): n is a, c, g, or t
  misc_feature (1121)..(1121): n is a, c, g, or t
  misc_feature (1132)..(1132): n is a, c, g, or t
  misc_feature (1134)..(1134): n is a, c, g, or t
  misc_feature (1136)..(1136): n is a, c, g, or t
  misc_feature (1138)..(1138): n is a, c, g, or t
  misc_feature (1140)..(1140): n is a, c, g, or t
  misc_feature (1147)..(1148): n is a, c, g, or t
  misc_feature (1155)..(1155): n is a, c, g, or t
  misc_feature (1163)..(1163): n is a, c, g, or t
  misc_feature (1173)..(1173): n is a, c, g, or t
  misc_feature (1175)..(1175): n is a, c, g, or t
aatagagaaaattaactatgagaggatcgcatcaccatcaccatcacggatcctatttaggtgacactatagaatcgtcgacccacgcgtccgcccacgcgtccgcaccagcatcctgcacaacctctcccaccaccgggaggggctgctcgccatcttcaagtcgggtggcatccctgctctggtccgcatgctcagctcccctgtggagtcggtcctgttctatgccatcaccacgctgcacaacctgctcctgtaccaggagggcgccaagatggccgtgcgcctggccgacgggctgcaaaagatggtgcccctgctcaacaagaacaaccccaagttcctggccatcaccaccgactgcctgcagctcctggcctacggcaaccaggagagcaagctgatcatcctggccaatggtgggccccaggccctcgtgcagatcatgcgtaactacagttatgaaaagctgctctggaccaccagtcgtgtgctcaaggtgctatccgtgtgtcccagcaataagcctgccattgtggaggctggtgggatgcaggccctgggcaagcacctgaccagcaacagcccccgcctggtgcagaactgcctgtggaccctgcgcaacctctcagatgtggccaccaagcaggagggcctggagagtgtgctgaagattctggtgaatcagctgagtgtggatgacgtcaacgtcctcacctgtgccacgggcacactctccaanctgacatgcaacaacancaagaacaagacgctggtgacacagaacagcggtgtggaggctctcatccatgnccatcctgcgtgctggtganaaggaannaaaatcacgganccttgncntctgcgcttttgcgccacctcaataaccgnccaaccctgaaggccnnanaatnggcccaaaaactctgtgcgttntcaannnatgggcantccaacccatncttgaaaantgnttcaaccanncccaaccnantgggccatttgnttnaaggcaaaccntttgggnttgattaanaaaattgggccttggggccaaaccaaacattgccccnnttaagaaagaaacggtnattcccccncctctgnccaaatnggtgggntgaaaggcccncnananancccaacnnctccatnttttattnaaaaaaaacncnt

SEQ ID NO: 330 - DNA, 972 bp, human
  misc_feature (604)..(604): n is a, c, g, or t
  misc_feature (650)..(650): n is a, c, g, or t
  misc_feature (653)..(653): n is a, c, g, or t
  misc_feature (672)..(672): n is a, c, g, or t
  misc_feature (691)..(691): n is a, c, g, or t
  misc_feature (694)..(694): n is a, c, g, or t
  misc_feature (698)..(698): n is a, c, g, or t
  misc_feature (701)..(701): n is a, c, g, or t
  misc_feature (705)..(705): n is a, c, g, or t
  misc_feature (723)..(723): n is a, c, g, or t
  misc_feature (733)..(733): n is a, c, g, or t
  misc_feature (739)..(740): n is a, c, g, or t
  misc_feature (746)..(746): n is a, c, g, or t
  misc_feature (750)..(751): n is a, c, g, or t
  misc_feature (759)..(759): n is a, c, g, or t
  misc_feature (794)..(794): n is a, c, g, or t
  misc_feature (799)..(799): n is a, c, g, or t
  misc_feature (817)..(817): n is a, c, g, or t
  misc_feature (824)..(824): n is a, c, g, or t
  misc_feature (829)..(830): n is a, c, g, or t
  misc_feature (833)..(833): n is a, c, g, or t
  misc_feature (838)..(838): n is a, c, g, or t
  misc_feature (849)..(849): n is a, c, g, or t
  misc_feature (886)..(887): n is a, c, g, or t
  misc_feature (891)..(891): n is a, c, g, or t
  misc_feature (913)..(913): n is a, c, g, or t
  misc_feature (922)..(922): n is a, c, g, or t
  misc_feature (930)..(930): n is a, c, g, or t
  misc_feature (936)..(936): n is a, c, g, or t
  misc_feature (946)..(946): n is a, c, g, or t
  misc_feature (961)..(961): n is a, c, g, or t
  misc_feature (969)..(969): n is a, c, g, or t
  misc_feature (971)..(971): n is a, c, g, or t
tagagaaattactatgagaggatcgcatcaccatcaccatcacggatcctatttaggtgacactatagaatcgtcgacccacgcgtccgcgggcggcggcggagcgggcggcggagcggcggcagcagcggtgagcgcgagccccggagccccgggcggccggcctcccgcgcccgcgcagccccgcgtctgcgtccggccggagacgccgggccccgcgccgcgccgcgccatgtcggtgaacatggacgagctgcggcaccaggtcatgatcaaccagttcgtgctggccgcgggctgcgcggccgaccaggcgaagcagttgctgcaggcggcccactggcagttcgagaccgcgctgagcacgttcttccaagaaaccaacattcccaacagccaccaccaccaccagatgatgtgcactcccagcaacacccctgccacgccgcccaacttccccgatgcgctggccatgttctccaagctccgcgcctccgagggcctgcagagcagcaacagccccatgacagccgcagcctgctccccacctgcaaacttcagccccttctgggcctcgtccccgcccagccaccaggcgccctgnatcccgccctcctcccccaccaccttccaccacctccaccgcccanagnccaagtggcccccaggatnacagcatgggggcgcccancanaaanccntggnggccatggacggccaaanattaaactgnacgccnnctggcnctgnntggaaatngggtgcacccctaggtttgtggggaacacagtaanggtcnatgggaggggggaacccngggaagngctannggnttttnccaaaaatccnctggaaaaaattttttaaaaaaaatttttgtggggtnngggnaaaaaaaaaaattttccttganccaattggnttcttttnaaaaanttttttaggnaaatttttttccttntttttttnana

SEQ ID NO: 331 - DNA, 483 bp, human
  misc_feature (234)..(234): n is a, c, g, or t
  misc_feature (290)..(290): n is a, c, g, or t
  misc_feature (294)..(294): n is a, c, g, or t
  misc_feature (298)..(298): n is a, c, g, or t
  misc_feature (315)..(315): n is a, c, g, or t
  misc_feature (409)..(409): n is a, c, g, or t
  misc_feature (411)..(411): n is a, c, g, or t
  misc_feature (415)..(415): n is a, c, g, or t
  misc_feature (438)..(438): n is a, c, g, or t
  misc_feature (443)..(444): n is a, c, g, or t
  misc_feature (448)..(450): n is a, c, g, or t
  misc_feature (456)..(456): n is a, c, g, or t
  misc_feature (465)..(465): n is a, c, g, or t
  misc_feature (467)..(467): n is a, c, g, or t
  misc_feature (472)..(472): n is a, c, g, or t
  misc_feature (476)..(476): n is a, c, g, or t
  misc_feature (480)..(480): n is a, c, g, or t
tgaatagagagaattactatgagaggatcgcatcaccatcaccatcacgggatcctatttaggtgacactatagaatcgtcgacccacgcgtccgcggacgcgtgggggagcatcccctgtccctgtgtgagcaggtggcccccatcattgacctcatggccgtcagcaatgcgctttttgccaagctccgggacttcatcaccctgcgtctgcctcctggcttcccagttaanattgaaatcccgatcttccacatcctcaacgcccgcatcaccttcgggaacctcancggntgcnacgaaccggtgccatcngtgcgaggcagccccagcagcgagacgccttccccaggcagcgactcctccagcgtcagcagctccagctccacgacctcctgccgcggctgcnanatcnccccagcgttgttcgaggccccncgcgnntacnnncatgangggctggcnancgggnggcngtanacc

SEQ ID NO: 332 - DNA, 1108 bp, human
  misc_feature (11)..(11): n is a, c, g, or t
  misc_feature (810)..(810): n is a, c, g, or t
  misc_feature (869)..(869): n is a, c, g, or t
  misc_feature (911)..(911): n is a, c, g, or t
  misc_feature (941)..(941): n is a, c, g, or t
  misc_feature (963)..(963): n is a, c, g, or t
  misc_feature (978)..(978): n is a, c, g, or t
  misc_feature (983)..(983): n is a, c, g, or t
  misc_feature (988)..(988): n is a, c, g, or t
  misc_feature (996)..(996): n is a, c, g, or t
  misc_feature (1005)..(1005): n is a, c, g, or t
  misc_feature (1021)..(1022): n is a, c, g, or t
  misc_feature (1033)..(1033): n is a, c, g, or t
  misc_feature (1045)..(1045): n is a, c, g, or t
  misc_feature (1060)..(1060): n is a, c, g, or t
  misc_feature (1065)..(1065): n is a, c, g, or t
  misc_feature (1067)..(1067): n is a, c, g, or t
  misc_feature (1069)..(1069): n is a, c, g, or t
  misc_feature (1077)..(1077): n is a, c, g, or t
  misc_feature (1083)..(1083): n is a, c, g, or t
  misc_feature (1088)..(1088): n is a, c, g, or t
  misc_feature (1091)..(1092): n is a, c, g, or t
  misc_feature (1099)..(1099): n is a, c, g, or t
  misc_feature (1103)..(1104): n is a, c, g, or t
  misc_feature (1106)..(1106): n is a, c, g, or t
aatagagaaanttaactatgagaggatcgcatcaccatcaccatcacggatcctatttaggtgacactatagaatcgtcgacccacgcgtccgcgtttagaggtttgaattttctcggagaaagacaggccggccacgaggaaaacagaaacaagccgcagcaacatctaagcccttgaaaggatcctgagagaggggggaaagggaaaacagcagccaccagcccaaccacttgtgtcttctgccccttcccacctatcttgcccaccccaccagcccacgctgcttgggacttgaaatctgtggccgaaggacccccaaatggacgagggggccctggtgggggcatggttggaggtggtgggcatcgtcctcacgaaggccctggtgggggcatgggcaacagcagtggacatcgtccccacgaaggccctggcggtggcatgggaagtgggcatcgcccccatgaaggccctggtggtagcatgggtgggggtggaggacatcgtccccacgaaggccctggcggtggcatcagtggtggcagtggccatcgtccccatgaaggccctggcggaggaatgggtgctggtggtggacatcgcccccacgaaggccctggcggaagcatgggtggaagtggtggacatcgtccccatgaaggccctggacacggggggccccatggccaccggcctcatgatgtccctggtcaccgaggccatgaccatcgagggccgccacctcatgagcaccgtggccatgatggtcctggccacgggggagggggccaccgagggcacgatggangccacagccatggaggagacatgtcaaaccgccctgtctgccgacatttcatgatgaanggcaactgccgctatgaaaacaactgtgccttctaccacccngggtgtcaatgggccccccctgccctaggnaccatttgcctgccctgttcanacaacccctgtggantgcancctcnctctttcnccctgttanggcttctgtgaggccnnttttccttttncccactgaaaanaaccggccccctcantcccntngntgggttcngggggntttcnatnnggggccntgannanaa

SEQ ID NO: 333 - DNA, 732 bp, human
  misc_feature (98)..(98): n is a, c, g, or t
  misc_feature (107)..(107): n is a, c, g, or t
  misc_feature (114)..(114): n is a, c, g, or t
  misc_feature (120)..(120): n is a, c, g, or t
  misc_feature (123)..(123): n is a, c, g, or t
  misc_feature (128)..(128): n is a, c, g, or t
  misc_feature (143)..(143): n is a, c, g, or t
  misc_feature (165)..(165): n is a, c, g, or t
  misc_feature (171)..(171): n is a, c, g, or t
  misc_feature (173)..(173): n is a, c, g, or t
  misc_feature (177)..(177): n is a, c, g, or t
  misc_feature (179)..(179): n is a, c, g, or t
  misc_feature (188)..(188): n is a, c, g, or t
  misc_feature (212)..(212): n is a, c, g, or t
  misc_feature (214)..(215): n is a, c, g, or t
  misc_feature (217)..(217): n is a, c, g, or t
  misc_feature (220)..(220): n is a, c, g, or t
  misc_feature (223)..(223): n is a, c, g, or t
  misc_feature (228)..(229): n is a, c, g, or t
  misc_feature (236)..(236): n is a, c, g, or t
  misc_feature (248)..(249): n is a, c, g, or t
  misc_feature (251)..(251): n is a, c, g, or t
  misc_feature (269)..(269): n is a, c, g, or t
  misc_feature (282)..(282): n is a, c, g, or t
  misc_feature (288)..(288): n is a, c, g, or t
  misc_feature (296)..(296): n is a, c, g, or t
  misc_feature (306)..(306): n is a, c, g, or t
  misc_feature (324)..(325): n is a, c, g, or t
  misc_feature (335)..(337): n is a, c, g, or t
  misc_feature (363)..(363): n is a, c, g, or t
  misc_feature (371)..(371): n is a, c, g, or t
  misc_feature (377)..(377): n is a, c, g, or t
  misc_feature (383)..(383): n is a, c, g, or t
  misc_feature (392)..(392): n is a, c, g, or t
  misc_feature (398)..(398): n is a, c, g, or t
  misc_feature (414)..(414): n is a, c, g, or t
  misc_feature (418)..(418): n is a, c, g, or t
  misc_feature (426)..(426): n is a, c, g, or t
  misc_feature (455)..(456): n is a, c, g, or t
  misc_feature (463)..(463): n is a, c, g, or t
  misc_feature (470)..(470): n is a, c, g, or t
  misc_feature (472)..(472): n is a, c, g, or t
  misc_feature (476)..(476): n is a, c, g, or t
  misc_feature (504)..(504): n is a, c, g, or t
  misc_feature (512)..(512): n is a, c, g, or t
  misc_feature (516)..(516): n is a, c, g, or t
  misc_feature (538)..(538): n is a, c, g, or t
  misc_feature (544)..(544): n is a, c, g, or t
  misc_feature (570)..(570): n is a, c, g, or t
  misc_feature (572)..(572): n is a, c, g, or t
  misc_feature (584)..(584): n is a, c, g, or t
  misc_feature (597)..(597): n is a, c, g, or t
  misc_feature (614)..(614): n is a, c, g, or t
  misc_feature (633)..(633): n is a, c, g, or t
  misc_feature (635)..(635): n is a, c, g, or t
  misc_feature (655)..(655): n is a, c, g, or t
  misc_feature (700)..(700): n is a, c, g, or t
  misc_feature (715)..(715): n is a, c, g, or t
  misc_feature (724)..(724): n is a, c, g, or t
  misc_feature (730)..(730): n is a, c, g, or t
tagagaaattactatgagaggatcgcatcaccatcaccatcacggatcctatttaggtgacactatagaatcgtcgacccacgcgtccggggaggggngcccgaggncgttgcngacctnggngctanagccgctgctgcctnggaagacagatcctccagtacncgcctncngtcngngcagagtgncgtgtcctcctcccacccctagcngnncnccntcncgganngatttcntaaacggccttnngncactagtcgatccgagcngccgccatccgtnactgcntgggttgntgacactccngttggcaaggtccactgnngagctatccnnngacaagattttctcaaccgggaaggnctgcaaantctgtnaatttngacgctggnggcgcngggctgctgatggttnaggnggaactcncaaaccttgccgaggtgtcctgcctctgnntgtccantcccccnanagcnagcagggactctgctccaccactagatnacaaaggnctgnacgaaacccgggctcctcaggntgtccnaggtgtcctggtctgaagagtgttcnanagaattctctcnaagagacgctgcnacctgtgcctggatcancctcctaggctctcatgantnagaataaacaggcagcccantgacatcccgggatgagagagcatcacctatagaccccctcctgncttctaagttagccngtgcctgangctgcngg

SEQ ID NO: 334 - DNA, 1103 bp, human
  misc_feature (641)..(641): n is a, c, g, or t
  misc_feature (874)..(874): n is a, c, g, or t
  misc_feature (885)..(885): n is a, c, g, or t
  misc_feature (908)..(908): n is a, c, g, or t
  misc_feature (918)..(918): n is a, c, g, or t
  misc_feature (923)..(923): n is a, c, g, or t
  misc_feature (927)..(927): n is a, c, g, or t
  misc_feature (944)..(944): n is a, c, g, or t
  misc_feature (947)..(947): n is a, c, g, or t
  misc_feature (957)..(957): n is a, c, g, or t
  misc_feature (969)..(969): n is a, c, g, or t
  misc_feature (974)..(974): n is a, c, g, or t
  misc_feature (976)..(976): n is a, c, g, or t
  misc_feature (984)..(984): n is a, c, g, or t
  misc_feature (989)..(989): n is a, c, g, or t
  misc_feature (999)..(999): n is a, c, g, or t
  misc_feature (1002)..(1002): n is a, c, g, or t
  misc_feature (1007)..(1007): n is a, c, g, or t
  misc_feature (1014)..(1014): n is a, c, g, or t
  misc_feature (1022)..(1022): n is a, c, g, or t
  misc_feature (1029)..(1029): n is a, c, g, or t
  misc_feature (1035)..(1035): n is a, c, g, or t
  misc_feature (1038)..(1038): n is a, c, g, or t
  misc_feature (1043)..(1043): n is a, c, g, or t
  misc_feature (1045)..(1046): n is a, c, g, or t
  misc_feature (1052)..(1052): n is a, c, g, or t
  misc_feature (1055)..(1055): n is a, c, g, or t
  misc_feature (1064)..(1064): n is a, c, g, or t
  misc_feature (1066)..(1066): n is a, c, g, or t
  misc_feature (1070)..(1070): n is a, c, g, or t
  misc_feature (1073)..(1073): n is a, c, g, or t
  misc_feature (1081)..(1081): n is a, c, g, or t
  misc_feature (1083)..(1083): n is a, c, g, or t
  misc_feature (1086)..(1086): n is a, c, g, or t
  misc_feature (1093)..(1093): n is a, c, g, or t
  misc_feature (1099)..(1099): n is a, c, g, or t
tagagaaattaactatgagaggatcgcatcaccatcaccatcacggatcctatttaggtgacactatagaatcgtcgacccacgcgtccgggctcggggcgccgaggcttccgcgcccgctggttcctcgctccggggcggagctcgcgatagcgaccgggagcagggcgcggggcgggacccaggtccgaggcgaggaagccggaagccaggcgcggggagcctcccccttcgactgcagcctcgctccgtgccttctgcgcgcctgggatcccggagcctgcctaggttctgtgcgctcccgcccaggccggtgcccgccgcccgcctgcgccccaggcaggtcccaggcctccggctgctcccggccgaaggtggggacaggcagtggcaggcaccactagcgagggcgtttgggaacccagggtgaccacggcgcagccatggggaccgcgcttgtgtaccatgaggacatgacggccacccggctgctctgggacgagtaagtgggacctggccgaggtggggtgcggggagggacctctgaactgagctcctcatctgccccagccccgagtgcgagatcgagcgtcctgagcgcctgaccgcagccctggatcgcctgcggcagcgcggcctgnaacagaggtgtctgcggttgtcagcccgcgaggcctcggaagaggagctgggcctggtgcacagagtacctttcactgcgcgcggctggccgcaggggctggactgcagctggtggacgctgtgctcactggagctgtgcaaaatgggcttgccctggtgaggcctcccgggcaccatggccagaaggcggctgccaacgggttctgcgtgttcaacaacgtggccataacanctgcacatgcnaacaaaaacacgggctaaacagnatcctcgtcntgaantggnatgtgcaccatggccanggnatccaatatntcttttaagatnacccnancgtctttnatttntcttggaacnctnttaanatgggcnctttggcntttctgnaaaatnaancaaancnntggggnggnaaaggcctngntttnttntaaactgncntgnaaacaanttgganggaa

SEQ ID NO: 335 - DNA, 1099 bp, human
  misc_feature (917)..(917): n is a, c, g, or t
  misc_feature (920)..(920): n is a, c, g, or t
  misc_feature (923)..(923): n is a, c, g, or t
  misc_feature (931)..(931): n is a, c, g, or t
  misc_feature (934)..(934): n is a, c, g, or t
  misc_feature (937)..(937): n is a, c, g, or t
  misc_feature (954)..(954): n is a, c, g, or t
  misc_feature (966)..(966): n is a, c, g, or t
  misc_feature (976)..(976): n is a, c, g, or t
  misc_feature (982)..(983): n is a, c, g, or t
  misc_feature (990)..(993): n is a, c, g, or t
  misc_feature (996)..(998): n is a, c, g, or t
  misc_feature (1000)..(1001): n is a, c, g, or t
  misc_feature (1003)..(1005): n is a, c, g, or t
  misc_feature (1022)..(1022): n is a, c, g, or t
  misc_feature (1026)..(1026): n is a, c, g, or t
  misc_feature (1029)..(1029): n is a, c, g, or t
  misc_feature (1038)..(1038): n is a, c, g, or t
  misc_feature (1040)..(1040): n is a, c, g, or t
  misc_feature (1044)..(1044): n is a, c, g, or t
  misc_feature (1052)..(1052): n is a, c, g, or t
  misc_feature (1059)..(1059): n is a, c, g, or t
  misc_feature (1065)..(1065): n is a, c, g, or t
  misc_feature (1068)..(1068): n is a, c, g, or t
  misc_feature (1077)..(1077): n is a, c, g, or t
  misc_feature (1081)..(1081): n is a, c, g, or t
  misc_feature (1091)..(1091): n is a, c, g, or t
attagagaaattactatgagaggatcgcatcaccatcaccatcacggatcctatttaggtgacactatagaatcgtcgacccacgcgtccgcggacgcgtgggggggtaacaagatggcgaccgagacggtggagctccataagctaaagcttgccgaactaaagcaagaatgtcttgctcgtggtttggagaccaagggaataaagcaagatcttatccacagactccaggcatatcttgaagaacatgctgaagaggaggcaaatgaagaagatgtactgggagatgaaacagaggaagaagaaacaaagcccattgagctccctgtcaaagaggaagaaccccctgaaaaaactgttgatgtggcagcagagaagaaagtggtgaaaattacatctgaaataccacagactgagagaatgcagaagagggctgaacgattcaatgtacctgtgagcttggagagtaagaaagctgctcgggcagctaggtttgggatttcttcagttccaacaaaaggtctgtcatctgataacaaacctatggttaacttggataagctgaaggaaagagctcaaagatttggtttgaatgtctcttcaatctccagaaagtctgaagatgatgagaaactgaaaaagaggaaggagcgatttgggattgtcacaagttcagctggaactggaaccacagaggatacagaggcaaagaagaggaaaagagcagagcgctttgggattgcctgatgaaaagttcctgatactttctgttctccagtgttttccatttctctccttcttcttggtcacatatatgcctaaatgcacagtcatgtgcctacgtcctgcctcgcaatgagggagcatgtaccccaggtacatccatgaactgcggcagcagtttgacttattgctgnttncancttaaggntgntgngttttgtttttgattangttgcttgttantaaaaaaaanttggannggagaannnnaannnannannnaaaaaagggcggccccncccnatnaggggcccnantaancttaattnacctgancttggnacncctgttganaaancccgtaatgnccccccaa

SEQ ID NO: 336 - DNA, 928 bp, human
atgagaggatcgcatcaccatcaccatcacggatcctatttaggtgacactatagaatcgtcgacccacgcgtccggactacgggggcaagaactgcaagaagccggccgagtacggctacgtgagcctggggcgcctgggggccgccaagggcgcgctgcaccccggctgcttcgcgcccctgcacccaccgcccccgccgccgccgccgcccgccgagctcaaggcggagccgggcttcgagcccgcggactgcaagcggaaggaggaggccggggcgccgggcggcggcgcaggcatggcggcgggcttcccgtacgcgctgcgcgcttacctcggctaccaggcggtgccgagcggcagcagcgggagcctctccacgtcctcctcgtccagcccgcccggcacgccgagccccgctgacgccaaggcgcccccgaccgcctgctacgcgggggccgcgccggcgccctcgcaggtcaagagcaaggccaagaagaccgtggacaagcacagcgacgagtacaagatccggcgcgagcgcaacaacatcgccgtgcgcaagagccgcgacaaggccaagatgcgcaacctggagacgcagcacaaggtcctggagctcacggccgagaacgagcggctgcagaagaaggtggagcagctgtcgcgcgagctcagcaccctgcggaacttgttcaagcagctgcccgagcccctgctcgcctcctccggccactgctagcgcggcccccgcgcgcgtccccctgccggccggggctgagactccggggagcgcccgcgcccgcgccctcgcccccgcccccggcggcgccggcaaaactttggcactggggcacttggcagcgcggggagcccgtcggtaattttaatatttattatatatatatatctatatttttgtccaaac

SEQ ID NO: 337 - DNA, 2077 bp, human
atgcagctgggtgaacagctgctggttagcagcgttaatctgcctggtgcacatttttatccgctggaaagcgcacgtggtggtagcggtggttctgcaggtcatctgccgagcgcagcaccgtcaccgcagaaactggatctggataaagccagcaaaaaatttagcggtagcctgagctgcgaagcagtttccggtgaaccagcagccgcaagcgctggtgcaccggcagcaatgctgagcgataccgatgccggtgatgcatttgcaagcgcagcagcagttgcaaaacctggtccgcctgatggtcgtaaaggtagcccgtgtggtgaagaagaactgccgagtgcagcagccgctgcagccgcagcagctgccgcagcagccgcaaccgcacgttatagcatggatagcctgagcagtgaacgttattatctgcagtctccgggtccgcagggtagcgaactggcagcaccgtgtagcctgtttccgtatcaagcggcagccggagcccctcacggtccggtttatccagcaccgaatggtgcacgttatccgtatggtagcatgctgcctccgggtggttttccggcagcagtttgtccgcctggtcgtgcacagtttggtccgggtgccggtgcaggtagcggtgccggtggtagctctggtggtggtggcggtccgggtacatatcagtatagccagggtgcaccgctgtatggtccttaccctggtgcagcagccgcaggtagctgtgggggtctgggtggcctgggtgttccgggtagcggttttcgtgcacatgtttatctgtgtaatcgtccgctgtggctgaaatttcatcgtcatcagaccgaaatgattattaccaaacagggtcgtcgcatgtttccgtttctgagctttaatattaatggtctgaacccgaccgcacattataatgtttttgtggaagttgttctggcagatccgaatcattggcgttttcagggtggtaaatgggttacctgtggcaaagcagataataacatgcagggcaacaaaatgtacgttcatccggaaagcccgaataccggtagccattggatgcgtcaggaaattagctttggcaaactgaaactgaccaataacaaaggtgccaataacaacaatacccagatgattgttctgcagagcctgcataaatatcagcctcgtctgcatattgttgaagttaccgaagatggtgtggaagatctgaatgaaccgagcaaaacccagacctttacctttagcgaaacccagtttattgcagttaccgcctatcagaataccgatatcacccagctgaaaatcgatcataatccgtttgccaaaggctttcgcgataattatgatagcagccatcagattgttccgggtggtcgttatggtgttcagagcttttttccggaaccgtttgttaataccctgccgcaggcacgttattataatggtgaacgtaccgttccgcaaaccaatggtctgctgtctccgcagcagagcgaagaagttgcaaatccgcctcagcgttggctggttacaccggttcagcagcctggcaccaataaactggatatcagcagctatgaaagcgaatataccagcagcaccctgctgccgtatggtattaaaagcctgccgctgcagaccagccatgcactgggttattatcctgatccgacctttccggcaatggcaggttggggtggtcgtggtagctatcagcgtaaaatggcagcaggtctgccgtggaccagccgtaccagcccgaccgtttttagcgaagatcagctgagcaaagagaaagttaaagaagaaattggcagcagctggattgaaacccctccgagcattaaatctctggatagcaacgatagcggtgtttataccagcgcatgtaaacgtcgtcgtctgagcccgagcaatagcagcaatgaaaatagcccgagcatcaaatgcgaagatatcaacgccgaagagtatagcaaagataccagcaaaggtatgggtggctattatgcattttataccaccccgtaagcggccgcttaattaa

SEQ ID NO: 338 - DNA, 1437 bp, human
  misc_feature (7)..(7): n is a, c, g, or t
ccgaaancaaaagggattccttgagaggatcgcatcccatcacatcacggtcgacccacgcgtccggggaaagaccgaaaggaagaggaagaggcaccggtggccatggggctggaggcggcgcgcgagctggagtgcgcggcgctgggcacgctgctgcgggatccgcgggaggcggaacgcacgctgctgctggactgccgccccttcctggccttctgccggcgccacgtgcgcgccgcgcggccagtgccttggaacgcgctgctgcggcgccgcgcgcgcggccctcctgccgccgttctcgcctgcctgctgcccgaccgcgcgctgcggacgcgcctggtccgcggggagctggcgcgggccgtggtgctggacgagggcagtgcctcggtggcggagctccggcccgacagcccggctcatgtgctgctggccgcgctgctgcacgagacccgcgcggggcccactgccgtgtacttcctgcgaggaggcttcgacggcttccagggctgctgtcccgatctgtgctctgaggcccccgcccctgcgctgccgccaacaggggacaaaaccagccgctccgactccagggctcctgtctacgaccaggtgagtattgaccccccctccccgaacctccctctctccccgccgcggactgggcgcctctagggaaagagcctgccatttggggatgccagcagtttgcccctaaacccccacttttataccggtgtgtgttggggaagggagtgcccaacaccccccccccccccactctcaccaacactacactccccccccccatcactcaccaccaccccaaccacaccccccccccgccccctcccctcccctcaaacaccgctcccctcccaaccacatcctctacacccaaccccaccacccccctccgcaaccacccaaccctccataccccactacactcgcataccaccaccgcaacccaaactcacacatacctcaaccacccacctccactcaccccaacccaaagtcacccccaccccaccacaccacacaccccaaccctacccctcacaaccacagtcctacccccccccacacttcacccacctaccgactcaccccactccatactatacccccctccccccatctccccaacctccccccacacttcactccatcttacacaccacctccctccctcactcaccatccccccctacccccaatcaccaccccaacacatctccccatcatcccccacccctaacccctcacactcccacatcaacacccacctctcccccacctctctaactccccacacccaccccctacttctctcccctacatccaacccctcccccaccaaacatcacctcatcactaccctctcctctccaactccacccctcaacaccaccatctcactctcctctc

SEQ ID NO: 339 - DNA, 741 bp, human
  misc_feature (713)..(713): n is a, c, g, or t
  misc_feature (718)..(719): n is a, c, g, or t
  misc_feature (721)..(723): n is a, c, g, or t
  misc_feature (725)..(741): n is a, c, g, or t
tagagagattactatgagaggatgcatcccatcaccatcacggatcctatttaggtgacactatagaatcgtcgactctggaccttggctgtcactcagttgacagaagtccactcattcttggcaggatggcttctcatcgtctgctcctcctctgccttgctggactggtatttgtgtctgaggctggccctacgggcaccggtgaatccaagtgtcctctgatggtcaaagttctagatgctgtccgaggcagtcctgccatcaatgtggccgtgcatgtgttcagaaaggctgctgatgacacctgggagccatttgcctctgggaaaaccagtgagtctggagagctgcatgggctcacaactgaggaggaatttgtagaagggatatacaaagtggaaatagacaccaaatcttactggaaggcacttggcatctccccattccatgagcatgcagaggtggtattcacagccaacgactccggcccccgccgctacaccattgccgccctgctgagcccctactcctattccaccacggctgtcgtcaccaatcccaaggaatgagggacttctcctccagtggacctgaaggacgagggatgggatttcatataaccaagagtattccatttttactaaagcagtgttttcacctcatatgctatgttagaagtccaggcagagacaataaaacattcctgtgangggcnnannnannnnnnnnnnnnnnnnn

SEQ ID NO: 340 - DNA, 1296 bp, human
  misc_feature (1)..(1): n is a, c, g, or t
  misc_feature (8)..(8): n is a, c, g, or t
  misc_feature (11)..(11): n is a, c, g, or t
  misc_feature (739)..(739): n is a, c, g, or t
  misc_feature (883)..(883): n is a, c, g, or t
ngcgcggnccnccaagagatactagagaggatgcatcccatcaccatcacggtcgacccacgcgtccggcggccaagatgtcgcagcccaagaaaagaaagcttgagtcggggggcggcggcgaaggaggggagggaactgaagaggaagatggcgcggagcgggaggcggccctggagcgaccccggaggactaagcgggaacgggaccagctgtactacgagtgctactcggacgtttcggtccacgaggagatgatcgcggaccgcgtccgcaccgatgcctaccgcctgggtatccttcggaactgggcagcactgcgaggcaagacggtactggacgtgggcgcgggcaccggcattctgagcatcttctgtgcccaggccggggcccggcgcgtgtacgcggtagaggccagcgccatctggcaacaggcccgggaggtggtgcggttcaacgggctggaggaccgggtgcacgtcctgccgggaccagtggagactgtagagttgccggaacaggtggatgccatcgtgagcgagtggatgggctacggactcctgcacgagtccatgctgagctccgtcctccacgcgcgaaccaagtggctgaaggagggcggtcttctcctgccggcctccgccgagctcttcatagtccccatcagcgaccagatgctggaatggcgcctgggcttctggagccaggtgaagcagcactatggtgtggacatgagcgncctggagggcttcgccacgcgctgtctcatgggccactcggagatcgttgtgcagggattgtccggcgaggacgtgctggcccggccgcagcgctttgctcagctagagctctcccgcgccggcttggagcaggagctggaggnccgaatgggccgggccttccgctgcagctgctatggctcggcgcccatgcatggctttgccatctggttccaggtgaccttccctggaagggaagccgagaacccctggtggttgtccctccgcctttcacccggcaccccctggaaaaaggcgctcctctacctgaccaacccgggcaatgggagcaaccccggccttccgggaaaatccgctggtgccccccgggaaacccccgtccccggccgggtgtggctccaagtgggaaccatggggaaaaccagaacttcctgggagaatgacgtgcctttccccattcctccacaaacccaactgtcggaaaggcatccggtcccagtaaaagtaaacccgcccaaaagcgaattcccccttccactaactagaggggaaatct

SEQ ID NO: 341 - DNA, 1367 bp, human
  misc_feature (12)..(12): n is a, c, g, or t
  misc_feature (880)..(880): n is a, c, g, or t
  misc_feature (924)..(924): n is a, c, g, or t
ccgccatccgcnttgggggatactagagaggacgcatcaccatcaccatcacggtcgacccacgcgtccgaggctgggccggcggcggctgcggcgggagaccggtgacccgcggctgggcgcctcggccatgactgcggagctgcagcaggacgacgcggccggcgcggcagacggccacggctcgagctgccaaatgctgttaaatcaactgagagaaatcacaggcattcaggacccttcctttctccatgaagctctgaaggccagtaatggtgacattactcaggcagtcagccttctcactgatgagagagttaaggagcccagtcaagacactgttgctacagaaccatctgaagtagaggggagtgctgccaacaaggaagtattagcaaaagttatagaccttactcatgataacaaagatgatcttcaggctgccattgctttgagtctactggagtctcccaaaattcaagctgatggaagagatcttaacaggatgcatgaagcaacctctgcagaaactaaacgctcaaagagaaaacgctgtgaagtctggggagaaaaccccaatcccaatgactggaggagagttgatggttggccagttgggctgaaaaatgttggcaatacatgttggtttagtgctgttattcagtctctctttcaattgcctgaatttcgaagacttgttctcagttatagtctgccacaaaatgtacttgaaaattgtcgaagtcatacagaaaagagaaatatcatgtttatgcaagagcttcagtatttgtttgctctaatgatgggatcaaatagaaaatttgtagacccgtctgcagccctggatctattaaagggagcattccgatcatctgangaaacagcagcagatgtgagtgaattcacacacaagctcctggnatggctagaggacgcattccagctagctgttaatgttaacagtcccaggacaaatctgaaaatcaatggtgcagctggtctatggtacttctgaactgaaagggttcgggagggaaacccttttgtacaatgaaaccttcggcagtatctcttcaggtaaacggttatccactttaaacaaaggttttgaaggcccatggtggaagggaaatttaaccttctcccccccaccatccgggaaaaaagaaaaaaaccgtgcttacaaaccaccccaagggtgaccttccatccacacaatgaacacccaacccctggcccccagaaaaatccaaaacctgaatttcccaaaatctaccgacgccactagtccgccgtatcatctttaacaaacacgtctcccatccacccccaataacatcccacagaaccagcttataaacacc

SEQ ID NO: 342 - DNA, 1254 bp, human
  misc_feature (969)..(969): n is a, c, g, or t
  misc_feature (974)..(974): n is a, c, g, or t
  misc_feature (982)..(982): n is a, c, g, or t
  misc_feature (995)..(995): n is a, c, g, or t
  misc_feature (1033)..(1033): n is a, c, g, or t
  misc_feature (1036)..(1036): n is a, c, g, or t
  misc_feature (1049)..(1049): n is a, c, g, or t
  misc_feature (1051)..(1051): n is a, c, g, or t
  misc_feature (1060)..(1060): n is a, c, g, or t
  misc_feature (1066)..(1066): n is a, c, g, or t
  misc_feature (1071)..(1071): n is a, c, g, or t
  misc_feature (1073)..(1073): n is a, c, g, or t
  misc_feature (1083)..(1083): n is a, c, g, or t
  misc_feature (1087)..(1087): n is a, c, g, or t
  misc_feature (1093)..(1093): n is a, c, g, or t
  misc_feature (1121)..(1121): n is a, c, g, or t
  misc_feature (1128)..(1129): n is a, c, g, or t
  misc_feature (1138)..(1138): n is a, c, g, or t
  misc_feature (1142)..(1142): n is a, c, g, or t
  misc_feature (1144)..(1144): n is a, c, g, or t
  misc_feature (1156)..(1156): n is a, c, g, or t
  misc_feature (1165)..(1165): n is a, c, g, or t
  misc_feature (1183)..(1183): n is a, c, g, or t
  misc_feature (1186)..(1186): n is a, c, g, or t
  misc_feature (1190)..(1190): n is a, c, g, or t
  misc_feature (1196)..(1196): n is a, c, g, or t
  misc_feature (1198)..(1198): n is a, c, g, or t
  misc_feature (1219)..(1220): n is a, c, g, or t
  misc_feature (1223)..(1224): n is a, c, g, or t
  misc_feature (1231)..(1231): n is a, c, g, or t
  misc_feature (1234)..(1235): n is a, c, g, or t
  misc_feature (1237)..(1237): n is a, c, g, or t
  misc_feature (1246)..(1247): n is a, c, g, or t
aattagagaaattactatgagaggatcgcatcaccatcaccatcacggatcctatttaggtgacactatagaatcgtcgacccacgcgtccggctccacagcccttttcaggacccaaacaaccgcagccgctgttcccaggatggtgatccgtgtatatattgcatcttcctctggctctacagcgattaagaagaaacaacaagatgtgcttggtttcctagaagccaacaaaataggatttgaagaaaaagatattgcagccaatgaagagaatcggaagtggatgagagaaaatgtacctgaaaatagtcgaccagccacaggttaccccctgccacctcagattttcaatgaaagccagtatcgcggggactatgatgccttctttgaagccagagaaaataatgcagtgtatgccttcttaggcttgacagccccacctggttcaaaggaagcagaagtgcaagcaaagcagcaagcatgaaccttaagcactgtgctttaagcatcctgaaaaatgagtctccattgcttttataaaatagcagaattagctttgcttcaaaagaaataggcttaatgttgaaataatagattagttgggttttcacatgcaaacattcaaaatgaatacaaaattaaaatttgaacattatggtgattatggtgaggagaatgggatattaacataaaattatattaataagtagatatcgtagaaatagtgttgttacctgccaagccatcctgtatacaccaatgattttacaaagaaaacacccttccctccttctgccattactatggcaacttaagtgtatctgcagctctacattaaaaaggagaaagagaaataacctgtctctcattcctaagttgcctcattaattttcatgaacaagaatatgtacctttttgatgctatattactgcgattaaaaagttcttgcaggtaatgtttatganatgtnaacgttgnaatttcctatcgnaattaaaacattcccattcttttgtaaatgaaacttcnacntattgaaccccananttttctgancttctnaatgnanccctttcttnggcnatttcngggatcaaaaaaaaaatccttttacccncccaaanncaaaaaatncttncnggggaaaaattnccttgtttnactcccccccttgaaggnaangatntttccnanttcctttgcccccgggaaaannccnntggtttntcnngnaaggggggnncccaaaa

SEQ ID NO: 343 - DNA, 1041 bp, human
  misc_feature (1)..(1): n is a, c, g, or t
  misc_feature (851)..(851): n is a, c, g, or t
  misc_feature (867)..(867): n is a, c, g, or t
  misc_feature (870)..(870): n is a, c, g, or t
  misc_feature (877)..(877): n is a, c, g, or t
  misc_feature (897)..(897): n is a, c, g, or t
  misc_feature (926)..(926): n is a, c, g, or t
  misc_feature (928)..(928): n is a, c, g, or t
  misc_feature (930)..(930): n is a, c, g, or t
  misc_feature (935)..(936): n is a, c, g, or t
  misc_feature (939)..(939): n is a, c, g, or t
  misc_feature (953)..(953): n is a, c, g, or t
  misc_feature (960)..(960): n is a, c, g, or t
  misc_feature (967)..(968): n is a, c, g, or t
  misc_feature (987)..(987): n is a, c, g, or t
  misc_feature (990)..(990): n is a, c, g, or t
  misc_feature (994)..(994): n is a, c, g, or t
  misc_feature (1001)..(1001): n is a, c, g, or t
  misc_feature (1019)..(1019): n is a, c, g, or t
  misc_feature (1024)..(1024): n is a, c, g, or t
  misc_feature (1027)..(1027): n is a, c, g, or t
  misc_feature (1029)..(1029): n is a, c, g, or t
  misc_feature (1034)..(1034): n is a, c, g, or t
  misc_feature (1036)..(1037): n is a, c, g, or t
  misc_feature (1040)..(1040): n is a, c, g, or t
naattagagaaattactatgagaggatcgcatcaccatcaccatcacggatcctatttaggtgacactatagaatcgtcgacccacgcgtccgcacagacccaccccgagcagccaggctccgaggccagcacacagcccatcgccgggacccagacagtgccgcagacagacgaggcggcacagacggacagccagccgctccacccctccgaccctacagagaagcagcagcccaagcggctacacgtctccaacatccccttccggttcagggaccccgacttgcggcaaatgttcgggcaattcggaaaaattttagacgtggagatcatttttaacgagcggggctccaaggtgggtgccgcacggagctgccgccttacagcgccggctgtaggtcccgccaggctaacgtgtgaaatgtgcgtttccttcctggagagcttcgcgcccgaggacccctgagcgacacggggttttgggtttgtaacttttgaaactagctcagatgctgaccgagcccgggagaagctgaatgggacgatcgtagagggacggaaaattgaggtcaataatgccacggcccgagtgatgaccaacaagaagacggggaacccctacaccaacggctggaagctaaatccagtggtcggcgcagtctacgggcctgaattctatgcagtgacggggttcccctaccccaccaccggcacagccgttgcctaccggggcgcacatcttcggggccggggccgggccgtgtataatacatttcgggctgcgccacccccaccccccatcccgacttacggagcggtcgtgtatcaggatggattttatggtgctganatttatggaggctacncancctacanatacgctcagcccgctgcancggcggcagcctacagcgacagttacggnanantctanncanctgccgacccgtancattcanaaccatnngggcccgcggggaacctanagnattnggaaccntgtgaaacctttccccgntttcnttntncggancnngang

SEQ ID NO: 344 - DNA, 1125 bp, human
  misc_feature (866)..(866): n is a, c, g, or t
  misc_feature (872)..(872): n is a, c, g, or t
  misc_feature (892)..(892): n is a, c, g, or t
  misc_feature (898)..(898): n is a, c, g, or t
  misc_feature (903)..(903): n is a, c, g, or t
  misc_feature (907)..(907): n is a, c, g, or t
  misc_feature (915)..(915): n is a, c, g, or t
  misc_feature (936)..(936): n is a, c, g, or t
  misc_feature (949)..(949): n is a, c, g, or t
  misc_feature (966)..(966): n is a, c, g, or t
  misc_feature (968)..(968): n is a, c, g, or t
  misc_feature (972)..(973): n is a, c, g, or t
  misc_feature (977)..(977): n is a, c, g, or t
  misc_feature (985)..(985): n is a, c, g, or t
  misc_feature (990)..(990): n is a, c, g, or t
  misc_feature (997)..(997): n is a, c, g, or t
  misc_feature (1001)..(1001): n is a, c, g, or t
  misc_feature (1004)..(1004): n is a, c, g, or t
  misc_feature (1015)..(1015): n is a, c, g, or t
  misc_feature (1035)..(1035): n is a, c, g, or t
  misc_feature (1044)..(1044): n is a, c, g, or t
  misc_feature (1049)..(1050): n is a, c, g, or t
  misc_feature (1053)..(1053): n is a, c, g, or t
  misc_feature (1057)..(1057): n is a, c, g, or t
  misc_feature (1065)..(1065): n is a, c, g, or t
  misc_feature (1070)..(1070): n is a, c, g, or t
  misc_feature (1074)..(1075): n is a, c, g, or t
  misc_feature (1079)..(1079): n is a, c, g, or t
  misc_feature (1091)..(1091): n is a, c, g, or t
  misc_feature (1103)..(1103): n is a, c, g, or t
  misc_feature (1110)..(1111): n is a, c, g, or t
  misc_feature (1115)..(1115): n is a, c, g, or t
  misc_feature (1124)..(1124): n is a, c, g, or t
attagagaaattactatgagaggatcgcatcaccatcaccatcacggatcctatttaggtgacactatagaatcgtcgacccacgcgtccgcggacgcgtgggtgcgtctgaagggtttggggtgtcagaccctaggaccccacaatcccacacccccaccctccctggacatgttcgctgaggagttggcggaggaggaactggagaccccaacccctacccagagaggagaagcagagtcgcggggagatggtctggtggatgtgatgtgggaatataagtgggagaacacgggggatgccgagctgtatgggcccttcaccagcgcccagatgcagacctgggtgagtgaaggctacttcccggacggtgtttattgccggaagctggacccccctggtggtcagttctacaactccaaacgcattgactttgacctctacacctgagcctgctgggggcccagtttggtgggcccttctttcctggactttgtggaggaggcaccaagtgtctcaggcagcgaggaaattggaggccatttttcagtcaatttccctttcccaataaaagcctttagttgtgtactggggccttggctgtgctgatggccagaagccaggggccttctccacagtccctttggacttgtcttggtccctgagtactcccatgaagatcctccttggaggtgcctgtcaggtatcctgtggcctccctgcctggactctgcttgccgtgtaaacaccccccaactgcgctgctctgtgctcctctcccaggtttcttgttcgattcctcttaggtctttggctttcaggaccctcagattcttttatccttgtaacccaccagaggacagagnccccanaagtggatgttttaggcccnaaaaangaccngggncatccaanaaaacatttggggaccccttnttggggggtgaancatggaaaccttcttantnttcnnttcncccctctncaagnttccttnaaangcntgggccaaaanttgggaataaaattggcccnaaaaaaccnaaaannccntaangtttcttnaaaanccanngggnctttcccctaancctgggttttcnttctaanncttntgccggccnt

SEQ ID NO: 345 - DNA, 1165 bp, human
  misc_feature (908)..(908): n is a, c, g, or t
  misc_feature (948)..(948): n is a, c, g, or t
  misc_feature (959)..(959): n is a, c, g, or t
  misc_feature (981)..(981): n is a, c, g, or t
  misc_feature (994)..(994): n is a, c, g, or t
  misc_feature (998)..(998): n is a, c, g, or t
  misc_feature (1001)..(1001): n is a, c, g, or t
  misc_feature (1010)..(1010): n is a, c, g, or t
  misc_feature (1013)..(1013): n is a, c, g, or t
  misc_feature (1024)..(1024): n is a, c, g, or t
  misc_feature (1047)..(1049): n is a, c, g, or t
  misc_feature (1055)..(1055): n is a, c, g, or t
  misc_feature (1059)..(1059): n is a, c, g, or t
  misc_feature (1065)..(1065): n is a, c, g, or t
  misc_feature (1078)..(1078): n is a, c, g, or t
  misc_feature (1080)..(1080): n is a, c, g, or t
  misc_feature (1091)..(1091): n is a, c, g, or t
  misc_feature (1095)..(1095): n is a, c, g, or t
  misc_feature (1099)..(1099): n is a, c, g, or t
  misc_feature (1103)..(1103): n is a, c, g, or t
  misc_feature (1109)..(1109): n is a, c, g, or t
  misc_feature (1111)..(1111): n is a, c, g, or t
  misc_feature (1119)..(1119): n is a, c, g, or t
  misc_feature (1122)..(1122): n is a, c, g, or t
  misc_feature (1127)..(1127): n is a, c, g, or t
  misc_feature (1138)..(1138): n is a, c, g, or t
  misc_feature (1142)..(1142): n is a, c, g, or t
  misc_feature (1144)..(1144): n is a, c, g, or t
  misc_feature (1149)..(1149): n is a, c, g, or t
  misc_feature (1154)..(1154): n is a, c, g, or t
  misc_feature (1160)..(1160): n is a, c, g, or t
  misc_feature (1165)..(1165): n is a, c, g, or t
agagaaattactatgagaggatcgcatcaccatcaccatcacggatcctatttaggtgacactatagaatcgtcgacccacgcgtccgcaccccctgccccaaacctccttctcacttgtgatcgcccagacctggatctccgcttcaccatcaagttccaggagtatagccctaatctctggggccacgagttccgctcgcaccacgattactacatcattgccacatcggatgggacccgggagggcctggagagcctgcagggaggtgtgtgcctaaccagaggcatgaaggtgcttctccgagtgggacaaagtccccgaggaggggctgtcccccgaaaacctgtgtctgaaatgcccatggaaagagaccgaggggcagcccacagcctggagcctgggaaggagaacctgccaggtgaccccaccagcaatgcaacctcccggggtgctgaaggccccctgccccctcccagcatgcctgcagtggctggggcagcaggggggctggcgctgctcttgctgggcgtggcaggggctgggggtgccatgtgttggcggagacggcgggccaagccttcggagagtcgccaccctggtcctggctccttcgggaggggagggtctctgggcctggggggtggaggtgggatgggacctcgggaggctgagcctggggagctagggatagctctgcggggtggcggggctgcagatccccccttctgcccccactatgagaaggtgagtggtgactatgggcatcctgtgtatatcgtgcaggatgggcccccccagagccctccaaacatctactacaaggtatgagggctcctctcacgtggctatcctgaatccagcccttcttggggtgctcctccagtttaattcctggtttgaggganacctctaaaatctcggccccctgtgcccccccagcccttnactcctccggntgctgtctcgtctccactttangattcttaagatnccantgncccacttcntgncctccgttggncatgggtgccccctttgtctcannncccggnatcnttttcnttgggagggcaangntcacctctttntganagancagnatcttntnccctcccnccnaaaanaggggggaaancccncntttgntgggncccctnttttn

SEQ ID NO: 346 - DNA, 1173 bp, human
  misc_feature (827)..(827): n is a, c, g, or t
  misc_feature (835)..(835): n is a, c, g, or t
  misc_feature (838)..(838): n is a, c, g, or t
  misc_feature (915)..(915): n is a, c, g, or t
  misc_feature (923)..(923): n is a, c, g, or t
  misc_feature (952)..(952): n is a, c, g, or t
  misc_feature (972)..(972): n is a, c, g, or t
  misc_feature (987)..(987): n is a, c, g, or t
  misc_feature (994)..(994): n is a, c, g, or t
  misc_feature (997)..(997): n is a, c, g, or t
  misc_feature (1005)..(1005): n is a, c, g, or t
  misc_feature (1012)..(1012): n is a, c, g, or t
  misc_feature (1052)..(1052): n is a, c, g, or t
  misc_feature (1057)..(1057): n is a, c, g, or t
  misc_feature (1087)..(1087): n is a, c, g, or t
  misc_feature (1091)..(1091): n is a, c, g, or t
  misc_feature (1100)..(1100): n is a, c, g, or t
  misc_feature (1125)..(1125): n is a, c, g, or t
  misc_feature (1129)..(1129): n is a, c, g, or t
  misc_feature (1133)..(1133): n is a, c, g, or t
  misc_feature (1137)..(1137): n is a, c, g, or t
  misc_feature (1139)..(1139): n is a, c, g, or t
  misc_feature (1143)..(1144): n is a, c, g, or t
  misc_feature (1148)..(1149): n is a, c, g, or t
  misc_feature (1164)..(1167): n is a, c, g, or t
gagaaattactatgagaggatcgcatcaccatcaccatcacggatcctatttaggtgacactatagaatcgtcgacccacgcgtccgcgccgagcaagatggcggcgcgagtgctgcgcgcccgcggagcggcctgggccggcggcctcctgcagcgggcggccccctgcagcctcctgcccaggctccggacatggacatcttccagcaacagatctcgagaagacagctggctaaaatccttatttgtccggaaagttgatccaagaaaagatgcccactccaatctcctagccaaaaaggaaacaagcaatctatacaaattacagtttcacaatgttaaaccggaatgcctagaagcatacaacaaaatttgtcaagaggtgttgccaaagattcacgaagataaacactacccttgtactttggtggggacttggaacacgtggtatggcgagcaggaccaagctgtccacctctggaggtatgaaggaggctatccagccctcacagaagtcatgaataaactcagagaaaataaggaatttttggaatttcgtaaggcaagaagtgacatgcttctctccaggaagaatcagctcctgttggagttcagtttctggaatgagcctgtgccaagatccggacctaatatatatgaactcaggtcttaccaactccgaccaggaaccatgattgaatggggcaattactgggctcgtgcaatccgcttcagacaggatggtaacgaagccgtcggaggattcttctctcagattgggcagctgtacatggtgcaccatctttgggcttacagggatcttcanaccagggnaanacatacggaatgcagcatggcacaaacatggctgggaggaattggtatattacacagttccacttattcaggaaatnggaatccnaaaatcatgatccccactgaaaaacctcncccctcccaataaaagctgntaaagttttttatgngccctanatnacattttntgtgaanaagtatttggccggaaaatttaatttttaattgggggaancaagnggaaaaaaaaaaccacttgaaggttttaancccngctgtaaantaactttggggaaaaaccctctttntttnaaantttncntaanncccnnaaaaggaaaaaattnnnnttggaa

SEQ ID NO: 347 - DNA, 1076 bp, human
  misc_feature (702)..(702): n is a, c, g, or t
  misc_feature (706)..(706): n is a, c, g, or t
  misc_feature (727)..(727): n is a, c, g, or t
  misc_feature (744)..(744): n is a, c, g, or t
  misc_feature (767)..(767): n is a, c, g, or t
  misc_feature (772)..(772): n is a, c, g, or t
  misc_feature (775)..(775): n is a, c, g, or t
  misc_feature (778)..(778): n is a, c, g, or t
  misc_feature (781)..(781): n is a, c, g, or t
  misc_feature (794)..(794): n is a, c, g, or t
  misc_feature (804)..(804): n is a, c, g, or t
  misc_feature (818)..(818): n is a, c, g, or t
  misc_feature (826)..(826): n is a, c, g, or t
  misc_feature (843)..(843): n is a, c, g, or t
  misc_feature (862)..(862): n is a, c, g, or t
  misc_feature (864)..(864): n is a, c, g, or t
  misc_feature (870)..(870): n is a, c, g, or t
  misc_feature (891)..(891): n is a, c, g, or t
  misc_feature (894)..(894): n is a, c, g, or t
  misc_feature (898)..(898): n is a, c, g, or t
  misc_feature (912)..(912): n is a, c, g, or t
  misc_feature (917)..(917): n is a, c, g, or t
  misc_feature (924)..(924): n is a, c, g, or t
  misc_feature (927)..(928): n is a, c, g, or t
  misc_feature (930)..(930): n is a, c, g, or t
  misc_feature (936)..(937): n is a, c, g, or t
  misc_feature (943)..(943): n is a, c, g, or t
  misc_feature (951)..(951): n is a, c, g, or t
  misc_feature (956)..(957): n is a, c, g, or t
  misc_feature (965)..(965): n is a, c, g, or t
  misc_feature (977)..(977): n is a, c, g, or t
  misc_feature (982)..(982): n is a, c, g, or t
  misc_feature (997)..(997): n is a, c, g, or t
  misc_feature (1006)..(1006): n is a, c, g, or t
  misc_feature (1021)..(1022): n is a, c, g, or t
  misc_feature (1039)..(1039): n is a, c, g, or t
  misc_feature (1044)..(1044): n is a, c, g, or t
  misc_feature (1047)..(1047): n is a, c, g, or t
  misc_feature (1052)..(1052): n is a, c, g, or t
  misc_feature (1056)..(1056): n is a, c, g, or t
  misc_feature (1069)..(1070): n is a, c, g, or t
  misc_feature (1076)..(1076): n is a, c, g, or t
tagagaaattactatgagaggatcgcatcaccatcaccatcacggatcctatttaggtgacactatagaatcgtcgacccacgcgtccggagctgctgcaaccattgacagcttagcaagccgaattgaggatcctcagatacaggctcattggtcaaatatcaatgatgtttatgaatctagtgtgaaagttttaatcacatcacaaggctatgaacaaatatgcaagtccattcaactgcaattgaatattggagttgagcagattcgagttgtacatagagatggaagagtaattacactgtcttatcaggagcaggagctacaggattttcttctgtctcagatgtcacagcaccaggtacatgcagttcagcaactcgccaaggttatgggctggcaagtactgagcttcagtaatcatgtgggacttggacctatagagagcattggtaatgcatctgccatcacggtggcctccccaagtggtgactatgctatttcagttcgtaatggacctgaaagtggcagcaagattatggttcagtttcctcgtaaccaatgtaaagaccttccaaaaagtgatgttttacaagataacaaatggagtcatcttcgtgggccattcaaagaagttcagtggaataaaatggaaggtcgaaattttgtttataaaatggagctgcttatgtctgcacttancccntgtctactatgattttttccnaaagtttcctaaagaantttcccagaaacttttgacttgnaatgnttngcnaantcaactataagcncaaagaaaanataccttccaaaanaatgctgntttttaaaaataataantaaggaaatgtttatttancnctttcnaactttttcccttttaaaaanganaagngcctttgaaatgcnaaaantttttgntanngnttgttnntaccgnatgaccanaatgnnaaaaaaanaaggtttttccngcccnttttaaaaaattacnaaacttaangggttcccaagggcnnttttaaaaaaaaccccnccttnganggggnaacnccaaaaaaaaaanngggggn

SEQ ID NO: 348 - DNA, 656 bp, human
  misc_feature (2)..(2): n is a, c, g, or t
  misc_feature (40)..(40): n is a, c, g, or t
gnaatataaaaaattatttgctttgtgagcggatacaatnataatagattaattgtgagcggataacaatttcacacagaattcattaaagaggagaaattaactatgagaggatcgcatcaccatcaccatcacggatcctatttaggtgacactatagaatcgtcgacccacgcgtccgcccatatcccccccctcaaccggaaggctgactgcccggagaatgccaccatgtctctgaagcatctcaccaagaagctgctaaaccgggatatccaggttgggaagagcggacattcctctgtggaagatgcccaggccaccatggagctatataagttggttgaagtcgagtgggaagagcacctagcccggaatccccctacagactagtggcagtggggacgctggtgatatgaggaggcagaggcagcacccaggagaaacagggcagtggaccaatggacagctccaccagctccacatctttggaagctagatttggggagagagaagctctaccccagacttaatacccattgaaatttcacctcaggtgttgtgtcctgtgtctggttaagtgtcccatggaaggggaaagccttcacgtcagaacccaaccctataccttttacttcttaaatggtgctaaccac

SEQ ID NO: 349 - DNA, 850 bp, human
  misc_feature (1)..(1): n is a, c, g, or t
nggttaaatagagagaatactatgagaggtcgcatcaccatcaccatcacggatcctatttaggtgacactatagaatcgtcgactctggaccttggctgtcactcagttggtgaggggccgcgtctcgcagcagccgcccggaccgggcatggtgttgggcgccgggcccgcctcgcctgtctcggggagcccagggtaaaggcagcagtagtgctaacgctagcaagtaaactgaagcgtgacgatggtctcaaagggtcccggacggcagccacagcgtccgactcgactcggagggtttctgtgagagacaaattgcttgttaaagaggttgcagaacttgaagctaatttaccttgtacatgtaaagtgcattttcctgatccaaacaagcttcattgttttcagctaacagtaaccccagatgagggttactaccagggtggaaaatttcagtttgaaactgaagttcccgatgcgtacaacatggtgcctcccaaagtgaaatgcctgaccaagatctggcaccccaacatcacagagacaggggaaatatgtctgagtttattgagagaacattcaattgatggcactggctgggctcccacaagaacattaaaggatgtcgtttggggattaaactctttgtttactgatcttttgaattttgatgatccactgaatattgaagctgcagaacatcatttgcgggacaaggaggacttccggaataaagtggatgactacatcaaacgttatgccagatgataaaaggggacgattgcaggcccatggactgtgttacaatttgtctctaacatgaaacagcaagagggagccccctctcc

SEQ ID NO: 350 - DNA, 873 bp, human
  misc_feature (587)..(587): n is a, c, g, or t
  misc_feature (704)..(704): n is a, c, g, or t
  misc_feature (802)..(802): n is a, c, g, or t
  misc_feature (804)..(804): n is a, c, g, or t
agagagattactatgagaggtcgcatcaccatcaccatcacggatcctatttaggtgacactatagaatcgtcgactctggaccttggctgtcactcagtttggccatctagtgttccagttcagcctgagcagcttgcaagtgctggtttttattatgtgggtcgcaatgatgatgtcaaatgcttttgttgtgatggtggcttgaggtgttgggaatctggagatgatccatgggtagaacatgccaagtggtttccaaggtgtgagttcttgatacgaatgaaaggccaagagtttgttgatgagattcaaggtagatatcctcatcttcttgaacagctgttgtcaacttcagataccactggagaagaaaatgctgacccaccaattattcattttggacctggagaaagttcttcagaagatgctgtcatgatgaatacacctgtggttaaacctgccttggaaatgggctttaatagagacctggtgaaacaaacagttcaaagtaaaatcctgacaactggagagaactataaaacagttaatgatattgtgtcagcacttcttaatgctgaagatganaaaagagaagaggagaaggaaaaacaagctgaagaaatggcatcagatgatttgtcattaattcggaagaacagaatggctctctttcacaattgacatgtgtgcttcctatcctgnataatctttttaaggccaaatgtattataaacaggaatatgatattattaacaaaaacacagatacctttacagcgagagactgatgatacattttgntnaaagaatgctgcgccacatctcaaaactgctaaagaatgatcacatgtaagaactattgtgatagatat

SEQ ID NO: 351 - DNA, 792 bp, human
  misc_feature (749)..(749): n is a, c, g, or t
  misc_feature (791)..(792): n is a, c, g, or t
gatagagagaatactatgagaggtcgcatcaccatcaccatcacggatcctatttaggtgacactatagaatcgtcgactctggaccttggctgtcactcagttctggaagatgagggaagccaggaaaagcagggcaggtccgaaggtgagggcaagccacaaggcgagggcaagccagcctcccaggcaaagccagagagccagccgcgggccgccgaaaagcgcccggctgaagattatgtgccccggaaagcaaaaagaaaaacggacagggggacggacgattcccccaaggactctcaggaggacttacaggaaaggcatctgagcagtgaggagatgatgagagaatgtggagatgtgtcaagggctcaagaggagctaagaaaaaaacagaaaatgggtggttttcattggatgcaaagagatgtacaggatccattcgccccaaggggacaacggggtgtcaggggagtgaggggtggaggtaggggccagaggggcttacacgatatcccatacctttaatgcctttggccttccattctgatttctctgatgagaatattgctggccctgctttccctggtaggtatttgccaggcccaatgctttaaccttaagctgatactttgctttagatgtcagtctcgttaccagcagccttttgacccaactacggcgctctatattttagtagaggattttcacccatgtgcatggaaaagatgttcatggtacattgtnaaaaaataaaattaaaatttaaaaaagtttgcagaaccgcann

SEQ ID NO: 352 - DNA, 857 bp, human
  misc_feature (586)..(586): n is a, c, g, or t
cccttttagagagattactatgagaggatgcatcccatcaccatcacggatcctatttaggtgacactatagaatcgtcgactctggaccttggctgtcactcagttaaggagaaggcggaagcacagcaggtggaggctctgccgggcccctcgctggaccagtggcaccgatcagctggggaggaagaggatggcccagtcctgacggatgagcagaagtcccgaatccaggccatgaagcccatgaccaaggcggagtgggatgcccggcagagcatcatccgcaaggtggtggaccctgagacggggcgcaccaggcttattaagggagatggcgaggtcctagaggaaatcgtaaccaaagaacgacacagagagatcaacaagcaagccacccgaggggactgcctggccttccagatgcgagctgggttgcttccctgagggcccccgctggccaaggcctgtggacgacgctggcggcccagcctgggcaggtttcagggtgccagtgggaagcctgatgggtgctggtggcctttcccccgtggattggtctctggcccagcccagtctcttctcangggcagggggtggaggttggggtcaccggcctgcttggcacccccatctgaaagagcagcacttctcagctattaaaggccccctggatagacaaaaaaaataaaaaaaaaaaaaacgagcggccgctcctatagtgagtcgtattagcttaattacctgagcttgactcctgttgaaaatccagaatgacctcagacctcctctggatttgtcaaaacgctcggtgccgcgggcgttttatattgtgagatccaactaccttgcgaaatt

SEQ ID NO: 353 - DNA, 883 bp, human
  misc_feature (747)..(747): n is a, c, g, or t
  misc_feature (870)..(871): n is a, c, g, or t
atactatgagaggatcgcatcaccatcaccatcacggatcctatttaggtgacactatagaatcgtcgactctggaccttggctgtcactcagttatgtacagactggctcatttttctccatttctctactatcaaagtcaagaactgcccaatggctctgtcaaggaggctccagctcctactcccacttctctggaagtctcaagtccaccagatactacagaggaagtagatcataagcctaaactctgcaggctggctaaaggtgaaaatggctatggctttcacttaaatgcgattcggggtctgccaggctcattcatcaaagaggtacagaagggcggtcctgctgacttggctgggctagaggatgaggatgtcatcattgaagtgaatggggtgaatgtgctagatgaaccctatgagaaggtggtggatagaatccagagcagtgggaagaatgtcacacttctagtctgtggaaagaaggcctatgattatttccaagctaagaaaatccctattgtttcctccctggctgatccacttgacacccctccagattctaaagaaggaatagtggtggagtcaaaccatgactcgcacatggcaaaagaacgggcccacagtacagcctcacattcttcttccaattctgaagatacagagatgtgatgaaaacaagtaatagctttggctgtttatttgatagctgtttctgggtatttaataggaatcctttctncaggaatgagttgtgacctgtttactgtctctttagagaaaaactccactggaaacccatcacatgtgtgatttgtctctgtatcattttgtctacaggcgctatgcagaagctatttatgcnntaactagagaga

SEQ ID NO: 354 - DNA, 1278 bp, human
  misc_feature (862)..(862): n is a, c, g, or t
ctgacttaactataaaataggcgtatcacgaggccctttcgtcttcacctcgagaaatcataaaaaatttatttgctttgtgagcggataacaattataatagattcaattgtgagcggataacaatttcacacagaattcattaaagaggagaaattaactatgagaggatcgcatcaccatcaccatcacggtcgacccacgcgtccgctgcaggcgctggtcacggaattccaggagacccaaagccaagacgccaaggagcaagtcctcgccaacctcgccaacttcgcttatgaccccagcaactacgagtatctgcggcagctgcaggtcctggatttatttctcgattcgctgtcggaggagaatgagaccctggtggagtttgctattggaggcctgtgcaacctgtgcccagacagggccaacaaggagcacatcctgcacgcaggaggtgtcccactcatcatcaactgcctatccagccccaatgaggagacggtgctgtctgccatcaccacgctcatgcacctgagcccgccgggccgcagctttctcccagagctgaccgccacgcccgtggtgcagtgcatgcttcgcttctccctctcggccagcgccaggctccggaacctggcacagatcttcctggaggacttctgctccccccgccaggtggccgaggcccgcagccggcaggcgcactctgccctgggtatcccactgccgaggagcgtggccccacggcagcgctgatccatggagactgcgagaacgtggcacccctactgctggagaccacagtcctgatgtggacgcaggaacggggagcacatactgcccccttgtgccttttcancctctgaaaggcgggtctttcacaggaagggatttacctggatgaaaaccccggggaaggaggaacccaaatccaaaaaccggaaaaaatcaaaggaacctgggttttaaggtgggcactctcaacccaattgggggccccccccccaaactccggccggggggaaaaagggccaaggccggacccaaaggttttaagaaaaggttctccagaacgggcccaaggttaagaaacatccccccccgcggaaaaccgggatatcccctaaacaaaggccgggaaaatctccagaaaaaaaaagaaacccccgggaaaagaactccccgcgaaaatgtgggccccccccgggccggggagagaaggcccccccggggctccccagggatttttggccgcgggggcacccagtaacatgg

SEQ ID NO: 355 - DNA, 1297 bp, human
  misc_feature (514)..(514): n is a, c, g, or t
  misc_feature (547)..(547): n is a, c, g, or t
  misc_feature (556)..(556): n is a, c, g, or t
  misc_feature (584)..(584): n is a, c, g, or t
  misc_feature (587)..(587): n is a, c, g, or t
gatatactgacttacctataaataggcgtatccgaggccctttcgtcttccctcgagaaatcataaaaaatttatttgctttgtgagcggataacaattataatagattcaattgtgagcggataacaatttcacacagaattcattaaagaggagaaattaactatgagaggatcgcatcaccatcaccatcacggtcgacccacgcgtccgcccacgcgtccgcccacgcgtccgcggccggggctgcttcgggaggaggagagccaagggaggcgccaggcccgcgggccgggcgcatggcttagggacgctcccggccgccgcagccccagcatggggaaacttcactccaagccggccgccgtgtgcaagcgcagggagagcccggaaggtgacagcttcgccgtgagcgctgcctgggctcggaagggcatcgaggagtggatcgggagacagcgctgcccgggcggtgtctcgggaccccgacagctgcggttggcgggcaccatangccgaagcacccgggagctcgtgggcgacgtgntgagagacncgctcaccgaggaaaaagaggacgactnccnctggaaaaagccactgccacctaataaaactgaccgatcttaccaccacctccaaaaaaactcactaatccacagcacaaacctttaatctttcataaaccaactaacatcaaatattccccatgcaataatacatcaactcaaactataaatatctgcccacataacattaacaattacaaaagacccccaataacctgccaaaacgaacaaaacatagtcacatcacaccatagaaagtgcaccaatccctcaaacacacacacaactcctacaaccctcacccaaaccaaacatctccgtaatcaatcaactccaacttttatactctccaatcagcttacccctccagccaaacactgacatagacatctcacacaaactcacatccactaaaaaacataatacacaaacactaacaccgccaagaaaaataatcacatgaaatatatacaactcattgacacactaatccttacaactacaagaatacagaactctcttaatacatacaaactactccatacataccccaacataaaagacttccacgcaacaccacacttataaatacataacccccaacccctacgcctcgctcctcaccacaacgactccctactacatctaccacacaatacactaatttcccataaactaaaacactcaatacaaatcactcattgctatacaaaagaattatataaaac

SEQ ID NO: 356 - DNA, 1368 bp, human
  misc_feature (7)..(7): n is a, c, g, or t
  misc_feature (9)..(10): n is a, c, g, or t
  misc_feature (579)..(579): n is a, c, g, or t
  misc_feature (586)..(586): n is a, c, g, or t
tcgaccncnnttagagaaatacatgagaggtcgcatcaccatcaccatcacggtcgacccacgcgtccgggtgagtcaagtgaagacatagaccaaatgttcagcactttgctgggagagatggatcttctgactcagagtttaggagttgacactctccctcctcctgaccctaatccacccagagctgaatttaactacagtgtggggtttaaagatttaaatgagtccttaaatgcactggaagaccaagatttagatgctctcatggcagatctggtagcagacataagtgaggctgagcagaggacaatccaggcacagaaagagtccttgcagaatcaacatcattcagcatctctacaagcatcaattttcagtggtgcagcctctcttggttatggaacaaatgttgctgccactggtatcagccaatatgaggatgacttaccacctccaccagccgatcctgtgttagaccttccactgccaccaccacctcctgaacctctctctcaggaagaggaagaagcccaagccaaggctgataaaattaagctggcgctggaaaaactgaangaggccnaggttaagaagctcgtcgtccaggtgcacatgaatggatacagcacaaagtcactgatgttggatgagccgcagctggcccgagatgttctgggaaaacttttccgagaaactcattgggactgccatgtaaactggtgcctttatgaaatctaccccgaactaccaattgaaagggtttttgaaaacatgaaaagggtgttggaatctttatccaactggccaagaagacccgaaatttaaatactttttttggaaaaaaaggaaaaaatttctggtttttaaaaccccccaaatttcccttggtttacccgaggaaaaaagaaaacccggggaacctatgggaaaaatggtgggtttaaaaaaaggaaatcctttttttggaaaaaattttttgggaaaattttttctttttcccacaaaggggaaggggtcttttttttttaaaaaaaaaggagaaaaaaaccccgaaaaaggcgcctttttttttttagggcgtcgggggaatttttttttcccccccagagaaaaaaaaaaaactccccaaagatgggggggtgttttaaacccgggaaaaggggcccttttttttgggggggcccccccaaaaaaaaaataaaaaaaccccccccccctattttttttttttttcataccccccccctcctttaagagagagcgccccccaaataaaaccttctgtgggggggggagaagaaaaaccccaaccttacggggggtggggaaagaaagacacacaccacgcgcaggaacacacttttc

SEQ ID NO: 357 - DNA, 1373 bp, human
  misc_feature (8)..(11): n is a, c, g, or t
cgtagacnnnncctaggaatactagagaggacgcatcaccatcaccatcacggtcgacccacgcgtccgcttcccaacggctccctcttccttccggctgtcgggatccaggatgaggggattttccggtgccaggcaatgaacaggaatggaaaggagaccaagtccaactaccgagtccgtgtctaccagattcctgggaagccagaaattgtagattctgcctctgaactcacggctggtgttcccaataaggtggggacatgtgtgtcagagggaagctaccctgcagggactcttagctggcacttggatgggaagcccctggtgcctaatgagaagggagtatctgtgaaggaacagaccaggagacaccctgagacagggctcttcacactgcagtcggagctaatggtgaccccagcccggggaggagatccccgtcccaccttctcctgtagcttcagcccaggccttccccgacaccgggccttgcgcacagcccccatccagccccgtgtctgggagcctgtgcctctggaggaggtccaattggtggtggagccagaaggtggagcagtagctcctggtggaaccgtaaccctgacctgtgaagtccctgcccagccctctcctcaaatccactggatgaaggatggtgtgcccttgcccccttccccccagccctgtgctgatcctccctgatatatgttctccacgccccatgaccccccatgtcgagtcccccccccctccacccaccctttccttccatagctcccttgccaacaccatattcacctaaccactcgtgaccgcccttactatccccctagactttcttccccccccccgcaccccccctcttccctccacctctcttcatgcccccatatcccaccttctacccctttgctccccccacttcaactctctccccccctatcaccctccccccccaccccccccctcccatcccccccccctccatctcattactccccctaccccaatacatcctctcccctacatcccaccccctccactacccctccacccacaccgtttcccctcctcaacccttctcaaccacctcgcacatccccactcccctcacccaccctctcgacaaccctacttcctcaaccatcccctctctaagccctctccgacactccaccactaccttacctcccctctccacacccccctcactctccactccctctccaaatcttccaattatcactcccacctcccacccttacctccccataccccaacctccccttccctcataccctgccacccgtcttcattaaacccatatcaccatactaaccataatccctctccctcaaacgctccacctc

SEQ ID NO: 358 - DNA, 905 bp, human
tgagaggtcgcatcaccatcaccatcacggtcgacccacgcgtccgaaacagtgtcataaaaccttcagtttttcaagttcccttcgagaacacgaaacaactcacactggagagaaaccctatgaatgtaaacaatgtggtaaaaccttcagtttttcaagttcccttcaaagacatgaaaggactcacaatgcagagaaaccctatgaatgtaaacagtgtgggaaagccttcaggtgttcaagttattttcgaattcatgaaaggtcacacactggagagaaaccctatgaatgtaaacagtgtggaaaagttttcattcgttccagttcctttcgactgcatgaaagaacacacactggagagaaaccctatgaatgtaaactatgcggtaaaaccttcagtttttcaagttcccttcgagaacatgaaaaaattcacactggaaataagccttttgagtgtaagcaatgtggtaaggccttccttcgttccagtcaaattcgattgcatgaaaggactcacactggagagaaaccgtatcaatgtaaacaatgtggaaaagccttcatttcttccagtaaatttcgaatgcatgagagaactcacacgggagagaaaccctatcgatgtaaacaatgtgggaaagccttcagattttcaagttctgttcgaattcatgaaaggtctcacactggagagaaaccttatgaatgcaaacaatgtggaaaagccttcatttcttccagtcactttcgactgcatgaaaggactcatatgggagagaaagtctaagaatataagcaacattctgaagccttcggttgttccagctccttctgaatacacaaaagagttcatactggacagaagctgtgtgaatacaaacattgttctaaagccc

SEQ ID NO: 359 - DNA, 1388 bp, human
  misc_feature (1)..(1): n is a, c, g, or t
  misc_feature (12)..(14): n is a, c, g, or t
  misc_feature (869)..(869): n is a, c, g, or t
  misc_feature (1196)..(1196): n is a, c, g, or t
  misc_feature (1228)..(1228): n is a, c, g, or t
nggccaaccccnnnctgagagatactagagaggatcgcatcaccatcaccatcacggtcgacccacgcgtccgggcgcgagcgagcagacgcgcacaccggcgagccaagttccgcagcctggcatggcttctggggacctttacgaggttgaaaggattgtagacaagaggaagaacaagaaaggaaaatgggagtatcttatccgatggaaaggctacgggagcaccgaggacacgtgggagccggagcaccacctcttgcactgtgaggagtttattgatgaattcaatgggctgcacatgtccaaggacaagaggatcaagtcagggaagcagtccagtacctccaagctgctgcgtgacagtcgaggcccgtcggttgagaaactgtcccacagaccttcagatcctggaaagagcaaggggacctcccataaacggaagcgaattaaccctcccctggccaagccaaaaaaagggtattcaggcaagccctcttcaggaggtgacagggccaccaagacggtgtcttacaggactacccccagtggtttgcaaataatgcccctgaaaaagtctcagaacgggatggaaaatggggacgccggctctgagaaggatgagaggcactttggaaatgggtcccatcagcctggcttggatttgaatgatcatgttggagagcaagatatgggtgaatgtgacgtgaatcacgctacactggcggagaacgggctcggctctgctctgaccaacgggggattgaacctgcacagtccagtgaagaggaagctggaagcggagaaagactacgtctttgacaaaaggctcagatacagtgtccgccagaatgaaagcaactgtcggnttcgagacatcgttgtgcgggaaggaaaaggggttcacgcacatcctgctgtcccgtcagaccttcgataacaatgcctgaaacctgagatcttaaaaaaaccccgccgacgcctcgtcaccccccccccaaccaaaccaatctttccccccacagacatggcgaccatttcctacacccctccctatttatcccactgcttgtgcgctggtaaccccccccctttccctaacacctcttacacctcatctctcccgccaccccactagaattcttcccacttcacataatagtccttcttaccactcttcccccattttcttccanacatcttcccccccacaggcttcagccgtccnctacactccctccctcaactatcctcctttaacgcttcctctacccaccctttccccctccactatactcctcacccccaccactatctcgcccgcctctccccctacctcgcacctactactatccctactcctcaccctccaccttctcaccctctca

SEQ ID NO: 360 - DNA, 627 bp, human
  misc_feature (37)..(37): n is a, c, g, or t
  misc_feature (53)..(53): n is a, c, g, or t
  misc_feature (75)..(75): n is a, c, g, or t
tcgagaatataaaaaattatttgctttgtgagcgganacaatataatagattnattgtgagcggataacaatttncacagaattattaaagaggagaaattaactatgagaggatcgcatcaccatcaccatcacggatcctatttaggtgacactatagaatcgtcgacccacgcgtccgcgagcacgagctgtgaggggattcacttgtgtgcggaactcctcggaaccatggcgtccctttcccttgcacctgttaacatctttaaggcaggagctgatgaagagagagcagagacagctcgtctgacttcttttattggtgccatcgccattggagacttggtaaagagcaccttgggacccaaaggcatggacaaaattcttctaagcagtggacgagatgcctctcttatggtaaccaatgatggtgccactattctaaaaaacattggtgttgacaatccagcagctaaagttttagttgatatgtcaagggttcaagatgatgaagttggtgatggcactacctctgttaccgttttagcagcagaattattaagggaagcagaatctttaattgcaaaaaagattcatccacagaccatcatagcgggttggagagaa

SEQ ID NO: 361 - DNA, 853 bp, human
  misc_feature (3)..(3): n is a, c, g, or t
  misc_feature (584)..(584): n is a, c, g, or t
  misc_feature (621)..(621): n is a, c, g, or t
  misc_feature (647)..(647): n is a, c, g, or t
  misc_feature (653)..(653): n is a, c, g, or t
  misc_feature (663)..(663): n is a, c, g, or t
  misc_feature (669)..(669): n is a, c, g, or t
  misc_feature (677)..(678): n is a, c, g, or t
  misc_feature (685)..(685): n is a, c, g, or t
  misc_feature (690)..(690): n is a, c, g, or t
  misc_feature (721)..(721): n is a, c, g, or t
  misc_feature (729)..(729): n is a, c, g, or t
  misc_feature (733)..(733): n is a, c, g, or t
  misc_feature (735)..(735): n is a, c, g, or t
  misc_feature (742)..(742): n is a, c, g, or t
  misc_feature (753)..(753): n is a, c, g, or t
  misc_feature (757)..(758): n is a, c, g, or t
  misc_feature (765)..(765): n is a, c, g, or t
  misc_feature (768)..(769): n is a, c, g, or t
  misc_feature (774)..(774): n is a, c, g, or t
  misc_feature (781)..(781): n is a, c, g, or t
  misc_feature (787)..(788): n is a, c, g, or t
  misc_feature (791)..(791): n is a, c, g, or t
  misc_feature (801)..(801): n is a, c, g, or t
  misc_feature (807)..(807): n is a, c, g, or t
  misc_feature (809)..(809): n is a, c, g, or t
  misc_feature (818)..(818): n is a, c, g, or t
  misc_feature (822)..(822): n is a, c, g, or t
  misc_feature (825)..(826): n is a, c, g, or t
  misc_feature (830)..(830): n is a, c, g, or t
  misc_feature (837)..(837): n is a, c, g, or t
ctntgagaggatcgcatcaccatcaccatcacggatcctatttaggtgacactatagaatcgtcgacccacgcgtccgcggacgcgtgggcagagcccagccggcgcggagcgggagcggtgcaggctgaggtctccgagcggctcgccatggctggcccgcagcagcagcccccttacctgcacctggccgagctgacggcgtcccagttcctggaaatatggaagcactttgacgcagacggaaatgggtatattgaaggtaaagagctagaaaactttttccaagagctggagaaggcaaggaaaggctctggcatgatgtcaaagagtgacaactttggagaaaagatgaaggagttcatgcagaagtatgataaaaactcagatgggaaaatcgagatggcagagctggcgcagatcctgccaaccgaagagaacttccttctgtgcttcaggcagcacgtgggctccagcgccgagtttatggaggcttggcggaagtacgacacagacaggagtggctacatcgaagccaatgagctcaagggattcctgtcagacctgctgaagaaggcgaaccgnccgtacgatgagcccaagctccaggaatacccccaanccatactacggatgtttgacttgaancggggnatgccaaatngggccntctcaaanntgtcccngaccncctgcctgtccaggaaaaacttccctgcttnaaatttcngggncntgaaagntgacccctcanaagnngttttanccnngatcntttcccntttttnnccnacaaaggatnagaaancnggcttactnttgnccnnagcnttgaggnttggaatggccctttt

SEQ ID NO: 362 - DNA, 1177 bp, human
  misc_feature (805)..(805): n is a, c, g, or t
  misc_feature (903)..(903): n is a, c, g, or t
  misc_feature (913)..(913): n is a, c, g, or t
  misc_feature (923)..(923): n is a, c, g, or t
  misc_feature (931)..(931): n is a, c, g, or t
  misc_feature (949)..(949): n is a, c, g, or t
  misc_feature (951)..(951): n is a, c, g, or t
  misc_feature (957)..(957): n is a, c, g, or t
  misc_feature (991)..(991): n is a, c, g, or t
  misc_feature (1001)..(1001): n is a, c, g, or t
  misc_feature (1003)..(1003): n is a, c, g, or t
  misc_feature (1007)..(1007): n is a, c, g, or t
  misc_feature (1013)..(1013): n is a, c, g, or t
  misc_feature (1036)..(1036): n is a, c, g, or t
  misc_feature (1047)..(1047): n is a, c, g, or t
  misc_feature (1050)..(1050): n is a, c, g, or t
  misc_feature (1056)..(1056): n is a, c, g, or t
  misc_feature (1062)..(1062): n is a, c, g, or t
  misc_feature (1064)..(1064): n is a, c, g, or t
  misc_feature (1072)..(1072): n is a, c, g, or t
  misc_feature (1075)..(1076): n is a, c, g, or t
  misc_feature (1090)..(1091): n is a, c, g, or t
  misc_feature (1101)..(1101): n is a, c, g, or t
  misc_feature (1109)..(1109): n is a, c, g, or t
  misc_feature (1117)..(1117): n is a, c, g, or t
  misc_feature (1142)..(1143): n is a, c, g, or t
  misc_feature (1152)..(1152): n is a, c, g, or t
  misc_feature (1162)..(1163): n is a, c, g, or t
agagaaattactatgagaggatcgcatcaccatcaccatcacggatcctatttaggtgacactatagaatcgtcgacccacgcgtccgacatgggagagaagccttatcaatgcaaagaatgtggaaaagcatttgcatataccagttctcttcgtagacatgaaaggacccactctgggaaaaaaccgtatgaatgtaagcaatatggggaaggcttatcctatcttataagttttcaaacacacataagaatgaactctggagaaagaccttataaatgtaagatatgtgggaaaggcttttattctgccaagtcatttcaaacacatgaaaaaactcacactggagagaaacgctataaatgcaagcaatgtggtaaagccttcaatctttccagttcctttcgatatcatgaaaggattcacactggagagaaaccctatgagtgtaagcagtgtgggaaagccttcagatctgcctcacagcttcgagtgcacggtgggactcacactggagagaaaccctatgaatgtaaggaatgtgggaaagccttcagatctacctcacaccttcgagtgcatggtaggactcatactggagagaaaccctatgaatgtaaggaatgtgggaaagccttcagatatgtgaagcaccttcaaattcatgaaaggacagaaaaacacataagaatgccctctggagaaagaccttataaatgtagtatatgtgagaaaggcttttattctgccaagtcatttcaaacacatgaaaaaactcacactggagagaaaccctatgaatgcnaccaatgtggtaaagccttcagatgttgcaattcccttcgatatcatgaaagggactcacactggaagagaaaccctatgagtgtaagcaatgtgggnaagccttcanatctgcctcncaccttcnaatgcatgaaaggactcncnctgganagaaacccctatgagtgtaagccatgggggaaancccttcagtngngccncaaccntccaaagcatggtaggacccccnctggaaaaaanccntatgantgtaancnatgggggnaannccttcaaatctgcnncaacccttcnaagcctgnaaaggacncccctgggaaaaaaccctttgattnnagggatggnaaaaaccttnnggaaattccctttt

SEQ ID NO: 363 - DNA, 871 bp, human
  misc_feature (3)..(3): n is a, c, g, or t
  misc_feature (680)..(680): n is a, c, g, or t
  misc_feature (704)..(704): n is a, c, g, or t
  misc_feature (715)..(715): n is a, c, g, or t
  misc_feature (723)..(723): n is a, c, g, or t
  misc_feature (729)..(729): n is a, c, g, or t
  misc_feature (733)..(733): n is a, c, g, or t
  misc_feature (737)..(737): n is a, c, g, or t
  misc_feature (748)..(748): n is a, c, g, or t
  misc_feature (765)..(765): n is a, c, g, or t
  misc_feature (789)..(789): n is a, c, g, or t
  misc_feature (791)..(791): n is a, c, g, or t
  misc_feature (799)..(799): n is a, c, g, or t
  misc_feature (804)..(804): n is a, c, g, or t
  misc_feature (808)..(808): n is a, c, g, or t
  misc_feature (846)..(846): n is a, c, g, or t
  misc_feature (865)..(865): n is a, c, g, or t
  misc_feature (868)..(868): n is a, c, g, or t
ttnattaaagaggagaaattaactatgagaggatcgcatcaccatcaccatcacggatcctatttaggtgacactatagaatcgtcgacccacgcgtccgcccacgcgtccggggagaaaccctatgaatgtaaggaatgtggcaaagcctttattagtcgccatcagcttaccgtacatcaaagggttcatactggagagaaaccctatgagtgtaaggaatgtggcaaggccttcagagtgcacgtacatctcacacagcatcggaaaattcatactgatgtaaagccctatgaatgtaaggaatgtggaaagacttttagtcgagcctcgtaccttgtacaacatagcagaatccatactggtaagaagccctatgagtgtaaggagtgtggcaaggccttcagttctggctcataccttgttcagcatcaaagaattcatactggggagaaaccctatgaatgtaacaaatgtgggaaagcctttactgtttatggacaacttattggacatcagagtgttcacactggtgagaaaccttttgaatgtaaggaatgcgggaaggcctttagacttaattcattccttactgaacatcagcgggtacacactggtgagaaaccctttaaatgcaaaaaatgtgggaagacctttagatacagttcagcccttaaagngcatctgagaaaacatatgagtgntataccctaanagtctgangagtgngggnaagngcttcgtgtgnggctcaaacattggtgnacatcggggaatttatgctggtangnaacttttnaatgngaanaatattggcaggtctattctcatcttaaaattcataanataactcaaaaaacataanaanatt

SEQ ID NO: 364 - DNA, 874 bp, human
  misc_feature (680)..(680): n is a, c, g, or t
  misc_feature (730)..(730): n is a, c, g, or t
gagatactatgagaggtcgcatcaccatcaccatcacggatcctatttaggtgacactatagaatcgtcgactctggaccttggctgtcactcagttaaatgtaaacaatgtggtaaagccttcagtcttgccggttcccttcgaagacatgaagcaactcacactggagtgaaaccctataaatgtcagtgtgggaaagcctttagtgatctctcttcctttcaaaatcatgagacaactcacactggagagaagccatatgagtgtaaggaatgtgggaaagcattcagttgtttcaaatacctttctcaacataaaaggacccacacagtagaaaaaccttatgagtgtaaaacatgtagaaaagccttcagtcatttcagtaacttaaaagtccatgaaaggattcactctggagagaagccatatgaatgtaaggaatgtggaaaagcattctcttggctcacttgccttctacgacatgaaagaattcacactggagagaaaccctatgaatgtctacaatgtggtaaagccttcactcgttcccgtttccttcgaggacatgaaaaaactcacactggagagaagctgtatgaatgtaaggaatgtgggaaagcattgagttctctccgttccttgcatagacataaaaggactcactggaaagatactctcntaatgtatggaatgtgggaaaacattcagtactttaatttcagaaacttngaagaactcactttggagaagaccctatgaatgtaacatgggaataagcttaagtagtttcatttttttaatacagtatcccccatatatgcagggaatggttcagcacctctaatcacgatgcaagtccttgtaatgcatatg

SEQ ID NO: 365 - DNA, 1401 bp, human
  misc_feature (11)..(13): n is a, c, g, or t
  misc_feature (871)..(871): n is a, c, g, or t
  misc_feature (954)..(955): n is a, c, g, or t
  misc_feature (991)..(991): n is a, c, g, or t
  misc_feature (996)..(997): n is a, c, g, or t
  misc_feature (1001)..(1001): n is a, c, g, or t
  misc_feature (1010)..(1013): n is a, c, g, or t
  misc_feature (1025)..(1030): n is a, c, g, or t
cgactatcgtnnnccaagagatactatagaggatgcatcaccatcaccatcacggtcgacccacgcgtccgcccacgcgtccggagaagatgacagttcaactagaagagactggtaagagattgcagtttgcagaaagcagaggtccacagcttgaaggtgctgacagtaagagctggaaatccattgtggttacaagaatgtatgaaaccaagttaaaagaattggaaactgatattgccaaaaaaaatcaaagcattactgaccttaaacagcttgtaaaagaagcaacagagagagaacaaaaagttaacaaatacaatgaagaccttgaacaacagattaagattcttaaacatgttcctgaaggtgctgagacagagcaaggccttaaacgggagcttcaagttcttagattagctaatcatcagctggataaagagaaagcagaattaatccatcagatagaagctaacaaggaccaaagtggagctgaaagcaccatacctgatgctgatcaactaaaggaaaaaataaaagatctagagacacagctcaaaatgtcagatctagaaaagcagcatttgaaggaggaaataaagaagctgaaaaaagaactggaaaattttgatccttcattttttgaagaaattgaagatcttaagtataattacaaggaagaagtgaagaagaatattctcttagaagagaaggtaaaaaaactttcagaacaattgggagttgaattaactagccctgttgctgcttctgaagagtttgaagatgaagaagaaagtcctgttaatttccccatttactaaaggtcacctataaactttgtttcatttaactatttattaactttataagntaaatatacttggaaataagcagttctccgaactgtagtatttccttctcactaccttgtacctttatacttagattgaattnnctaataaataaaattatatgaaattttcaaaaaaanaaaannaaanaaaaaaaannnnaaaaaaaaaaannnnnnaaggggggccgctgcaagacctcgcgccgactcgcgacggagaacgcttgcacgccagaaagtccctctatggctgctgaacggctctgaaccaacaacccccctcggctcggaacaaatcccaaaacgaaaggagtgaatggcaaaccatgatgccctgaacacggggcttccccaagaacaagggttgccctccccgccccccggggggtggggaattcccacccctccacccaaaaaaaccccacgcttcacgcctaggggaacatacaacgggggaaaaattcccacccttttttttggtgccccatttaaaaccccccccctcctccccccattaaaaccatattcccccgctacggagaccttca

SEQ ID NO: 366 - DNA, 916 bp, human
  misc_feature (833)..(833): n is a, c, g, or t
  misc_feature (844)..(844): n is a, c, g, or t
  misc_feature (897)..(897): n is a, c, g, or t
catagagagaatactatgagaggatgcatcaccatcaccatcacggatcctatttaggtgacactatagaatcgtcgactctggaccttggctgtcactcagttaaagatctgaaatctgaactgtcaggaaactttgagaagacaatcttggctctgatgaagaccccagtcctctttgacatttatgagataaaggaagccatcaagggggttggcactgatgaagcctgcctgattgagatcctcgcttcccgcagcaatgagcacatccgagaattaaacagagcctacaaagcagaattcaaaaagaccctggaagaggccattcgaagcgacacatcagggcacttccagcggctcctcatctctctctctcagggaaaccgtgatgaaagcacaaacgtggacatgtcactcgcccagagagatgcccaggagctgtatgcggccggggagaaccgcctgggaacagacgagtccaagttcaatgcggttctgtgctcccggagccgggcccacctggtagcagttttcaatgagtaccagagaatgacaggccgggacattgagaagagcatctgccgggagatgtccggggacctggaggagggcatgctggccgtggtgaaatgtctcaagaataccccagccttctttgcggagaggctcaacaaggccatgaggggggcaggaacaaaggaccggaccctgattcgcatcatggtgtctcgcagcgagaccgacctcctggacatcagatcagagtataagcggatgtacggcaagtcgctgtaccacgacatctcgggagatacttcaggggattaccgnaagatctgctngagtctgtggtggcatgactgacagtgactggtgctcactctgcccactgccngcacacagtgccagaaaag

SEQ ID NO: 367 - DNA, 1095 bp, human
  misc_feature (810)..(810): n is a, c, g, or t
  misc_feature (839)..(839): n is a, c, g, or t
  misc_feature (850)..(850): n is a, c, g, or t
  misc_feature (856)..(856): n is a, c, g, or t
  misc_feature (916)..(916): n is a, c, g, or t
  misc_feature (930)..(930): n is a, c, g, or t
  misc_feature (964)..(964): n is a, c, g, or t
  misc_feature (967)..(967): n is a, c, g, or t
  misc_feature (995)..(995): n is a, c, g, or t
  misc_feature (1005)..(1005): n is a, c, g, or t
  misc_feature (1007)..(1007): n is a, c, g, or t
  misc_feature (1011)..(1011): n is a, c, g, or t
  misc_feature (1015)..(1015): n is a, c, g, or t
  misc_feature (1043)..(1043): n is a, c, g, or t
  misc_feature (1052)..(1052): n is a, c, g, or t
  misc_feature (1067)..(1067): n is a, c, g, or t
  misc_feature (1069)..(1070): n is a, c, g, or t
  misc_feature (1073)..(1073): n is a, c, g, or t
  misc_feature (1076)..(1076): n is a, c, g, or t
  misc_feature (1082)..(1082): n is a, c, g, or t
  misc_feature (1088)..(1088): n is a, c, g, or t
  misc_feature (1090)..(1090): n is a, c, g, or t
  misc_feature (1092)..(1092): n is a, c, g, or t
  misc_feature (1094)..(1095): n is a, c, g, or t
tagagaaattactatgagaggatcgcatcaccatcaccatcacggatcctatttaggtgacactatagaatcgtcgacccacgcgtccgcccacgcgtccgcccacgcgtccggcgggctgccggtgcttgtggaactgctgcagtctgagaccgacaaggtggtgcgcgccgtcgccatcgctctgcgcaacctctcgctggaccggcgcaacaaagacctcatcgggagctacgccatggctgagcttgtgcggaatgtgcgcaatgcacaggctccgccgcgaccgggggcctgcctggaggaagacaccgtggtggcggtgctcaacaccatccacgaaatcgtgtccgacagcctggataacgcgcgctcgctcctgcaggcacgcggggtgccagcgttggtggctctcgtggcctccagccaatcggtacgcgaagcgaaggcggcgtcacacgtgctgcagacagtgtggagctacaaggagctgcgtggtaccttgcagaaagatggttggaccaaggcgcgcttccagtcagctgctgctactgccaaggggcctaagggagcactgagtcctgggggcttcgatgacagcacgctgccactggtggacaagagccttgagggcgagaaaactggcagccgggatgtgatccccatggatgcgctgggcccagacggatactccacggtggaccagagggagcggaggccacggggcgccagctctgcaggagaggcctctgagaaggaacccttgaaactcgaccccagcaggaaggcccctccccccgggcccagcangcccgcggtcaggctggtggacgccgtangggacgctaancctcancccgttgattcctgggtctagcttgcatgcctgggcccaggcccagcctcttgttcttanggcttggatcgtgnaaaaaggccaccctgaacaaatcgtgccgtgganctngaaccccctggcggcaggggttggcacncctcccccancnaacntganttggggaaaccttctgcccccaacccantcccccatntaataaatcctaagncnnaantantgttantgaaangngntnn

SEQ ID NO: 368 - DNA, 990 bp, human
atgaccacccagcagatagacctccagggcccggggccgtggggcttccgcctcgtgggcggcaaggacttcgagcagcctctcgccatttcccgggtcactcctggaagcaaggcggctctagctaatttatgtattggagatgtaatcacagccattgatggggaaaatactagcaatatgacacacttggaagctcagaacagaatcaaaggctgcacagacaacttgactctcactgtagccagatctgaacataaagtctggtctcctctggtgacggaggaagggaagcgtcatccatacaagatgaatttagcctctgaaccccaggaggtcctgcacataggaagcgcccacaaccgaagtgccatgccctttaccgcctcgcctgcctccagcactactgccagggtcatcacaaaccagtacaacaacccagctggcctctactcttctgaaaatatctccaacttcaacaatgccctggagtcaaagactgctgccagcggggtggaggcgaacagcagacccttagaccatgctcagcctccaagcagccttgtcatcgacaaagaatctgaagtttacaagatgcttcaggagaaacaggagttgaatgagcccccgaaacagtccacgtctttcttggttttgcaggaaatcctggagtctgaagaaaaaggggatcccaacaagccctcaggattcagaagtgttaaagctcctgtcactaaagtggctgcgtcgattggaaatgctcagaagttgcctatgtgtgacaaatgtggcactgggattgttggtgtgtttgtgaagctgcgggaccgtcaccgccaccctgagtgttatgtgtgcactgactgtggcaccaacctgaaacagaagggccatttctttgtggaggatcaaatctactgtgagaagcatgcccgggagcgagtcacaccacctgagggttatgaagtggtcactgtgttccccaagtga

SEQ ID NO: 369 - DNA, 876 bp, human
tgagaggatcgcatcaccatcaccatcacggatcctatttaggtgacactatagaatcgtcgacccacgcgtccgcggacgcgtgggcccagacctgggaggggaggcccctcctgttagcccagagggaaagaaagaactggggcgatccgggacctggtggccttagtctttcaggtggaacggtgtgcgacatgggaaagaaaaccaagcggacagctgacagttcttcttcagaggatgaggaggagtatgttgtggagaaggtgctagacaggcgcgtggttaagggacaagtggaatatctactgaagtggaaaggcttttctgaggagcacaatacttgggaacctgagaaaaacttggattgccctgagctaatttctgaatttatgaaaaagtataagaagatgaaggagggtgaaaataataaacccagggagaagtcagaaagtaacaagaggaaatccaatttctcaaacagtgccgatgacatcaaatctaaaaaaaagagagagcagagcaatgatatcgctcggggctttgagagaggactggaaccagaaaagatcattggggcaacagattcctgtggtgatttaatgttcctaatgaaatggaaagacacagatgaagctgacctggttcttgcaaaagaagctaatgtgaaatgtccacaaattgtgatagcattttatgaagagagactgacatggcatgcatatcctgaggatgcggaaaaacaaagagaaagaaacagcaaagagctaaaggaggggatggtctctgtcatttctctttgtacataatacattcacctccctgcctcctctcctttctacccacccctttctatcctaaacacatccataaaaa

SEQ ID NO: 370 - DNA, 932 bp, human
catcaccatcaccatcacggatcctatttaggtgacactatagaatcgtcgacccacgcgtccgacgtaatgaaagaccctgagacaaggcagctggtcctgcagacaggtgctcttgtcctgagtgacaacggcatctgctgtatcgatgagttcgacaagatgaatgaaagtacaagatcggtattgcatgaagtcatggaacagcagactctgtccattgcaaaggctgggatcatctgtcagctcaatgcgcgcacctctgtcctggcagcagcaaatcccattgagtctcagtggaatcctaaaaaaacaaccattgaaaacatccagctgcctcatactttattatcaaggtttgatttgatcttcctcatgctggaccctcaggacgaagcctatgacaggcgtctggctcaccacctggtcgcactgtactaccagagcgaggagcaggcagaggaggagctcctggacatggcggtgctaaaggactacattgcctacgcgcacagcaccatcatgccgcggctaagtgaggaagccagccaggctctcatcgaggcttatgtagacatgaggaagattggcagtagccggggaatggtttctgcataccctcgacagctagagtcattaatccgcttagcagaagcccatgctaaagtaagattgtctaacaaagttgaagccattgatgtggaagaggccaaacgcctccatcgggaagctctgaagcagtctgcaactgatccccggactggcatcgtggacatatctattcttactacggggatgagtgccacctctcgtaaacggaaagaagaattagctgaagcattgaaaaagcttattttatctaagggcaaaacaccagctctaaaataccagcaactttttgaagatattcggggacaatctgacatagcaat

SEQ ID NO: 371 - DNA, 923 bp, human
catcaccatcaccatcacggatcctatttaggtgacactatagaatcgtcgacccacgcgtccgagatgaaggccttagctgttgaaggaaaacgaattggaaaggtgcttgacaatgctattgaaacagaaaaaatgattgaaaagtatgaatcacttgcctctgaccttctggaatggattgaacaaaccatcatcattctgaacaatcgcaaatttgccaattcactggtcggggttcaacagcagcttcaggcattcaacacttaccgcactgtggagaaaccacccaaatttactgagaaggggaacttggaagtgctgctcttcaccattcagagcaagatgagggccaacaaccagaaggtctacatgccccgggaggggaagctcatctctgacatcaacaaggcctgggaaagactggaaaaagcggaacacgaaagagaactggctttgcggaatgagctcataagacaggagaaactggaacagctcgcccgcagatttgatcgcaaggcagctatgagggagacttggctgagcgaaaaccagcgtctggtgtctcaggacaactttgggtttgaccttcctgcagttgaggccgccacaaaaaagcacgaggccattgagacagacattgccgcatacgaggagcgtgtgcaggctgtggtagccgtggccagggagctcgaggccgagaattaccacgacatcaagcgcatcacagcgaggaaggacaatgtcatccggctctgggaatacctactggaactgctcagggcccggagacagcggctcgagatgaacctggggctgcagaagatattccaggaaatgctctacattatggactggatggatgaaatgaaaggtgctagtattgtctcaagactatggcaaacacttacttggtgtggaag

SEQ ID NO: 372 - DNA, 956 bp, human
  misc_feature (893)..(893): n is a, c, g, or t
  misc_feature (908)..(908): n is a, c, g, or t
  misc_feature (919)..(919): n is a, c, g, or t
  misc_feature (935)..(935): n is a, c, g, or t
  misc_feature (939)..(939): n is a, c, g, or t
  misc_feature (943)..(943): n is a, c, g, or t
  misc_feature (951)..(951): n is a, c, g, or t
tagagaaattactatgagaggatcgcatcaccatcaccatcacggatcctatttaggtgacactatagaatcgtcgacccacgcgtccggtgctacagcagctcagcagggtggatatgagatcccagcaaggttgcggacgttgcacaacctggtgatccagtacgcagcccaaggtcgctatgaggtggccgtgccactctgtaagcaggcactagaggacctggagcgcacatcaggccgtggccaccctgatgtcgccaccatgctcaacatccttgctttggtgtatcgtgaccagaataagtataaggaagctgcccacctgctgaatgatgcccttagcatccgggagagcaccttgggacctgaccatcctgctgtggctgccacactcaacaatttggctgtgctctatggcaaaaggggcaagtacaaggaggcagagcctctgtgccagcgggcactggagattcgagaaaaggtcctgggcacgaatcatccagatgtggcaaaacagctgaacaacctggccctcttgtgccaaaaccagggcaagtatgaggccgtggaacgctactaccagcgagcactggccatctacgaggggcagctggggccggacaaccctaatgtagcccggaccaagaacaacctggcttcctgttacctgaaacagggcaaatatgctgaggctgagacactatacaaagagatcctgacccgtgcccatgtacaggagtttgggtctgtggatgatgaccacaagcccatctggatgcatgcagaggagcgggaggaaatgagcaaaagccggcaccatggagggtgggacaccctatgctgagtatggaggctggtacaaggcctgcaaagtgagcagcccccacagngaacactactctganaaacctgggancttttgtataggcgcnaggnaaanctggaggntgctg

SEQ ID NO: 373 - DNA, 835 bp, human
  misc_feature (740)..(740): n is a, c, g, or t
  misc_feature (778)..(778): n is a, c, g, or t
  misc_feature (786)..(786): n is a, c, g, or t
gagagatactatgagaggtcgcatcaccatcaccatcacggatcctatttaggtgacactatagaatcgtcgactctggaccttggctgtcactcagttgtgaaggtggctatgattgaacctggctatttcaagactgctgtgaccagtaaggagagattcttaaagagcttcctggagatttgggaccggtccagtccagaggtcaaggaggcctatggcgagaagtttgctgcagactataagaaatcagctgaacaaatggagcagaagtgcacacaggatctgtcgttggtgaccaactgcatggagcatgcgctgattgcctgccacccccgtactcgctactcagctggctgggatgccaagcttctctacctccccatgagctacatgcccaccttcctggtggatgccattatgtactgggtctctccaagcccggccaaggctctatgaagctaaggttggatgcatggttgcatggatttggggtgtgctatgaggggtggtgtatccttgggagagatataaagtggagggagggagccgtccggtcagtagggcaccaatcccacctccttcattacctcctggccatgattctcctgggagataattctgctctctggagatgttggtaggaaagtttcaagttacgcagctgagaaacagggaccaaatagtgctcctgggtgcattgtcaccgtgggtggcccactcagggtccaagcctctanggccatccttggggctacaactggggtgggtgtgagcnagtggaangagcctcagcccatgccattactccctgctcctatcaggctgtgtgtta

SEQ ID NO: 374 - DNA, 879 bp, human
  misc_feature (745)..(746): n is a, c, g, or t
  misc_feature (769)..(769): n is a, c, g, or t
  misc_feature (813)..(813): n is a, c, g, or t
  misc_feature (821)..(822): n is a, c, g, or t
  misc_feature (853)..(854): n is a, c, g, or t
actatgagaggtcgcatcaccatcaccatcacggatcctatttaggtgacactatagaatcgtcgactctggaccttggctgtcactcagttaaagaactattgtcgagtgatgcgatgaaagaatataacagggctcgagtctacctggatgaaaactacaaatcccaggagcacttcacggcactaggaagcttttattttcttcatgagtccttaaaaaacatctaccagtttgactttaaagctaagaagtatagaaaggtcgctggcaaagagatctactcggataccttagagagcacgcccatgctggagaaggagaagtttccgcaggactacttccccgagtgcaaatggtcaagaaaaggcttcatccggacgaggtggtgcattgcagactgtgcctttgacttggtgaatatccatcttttccatgatgcttccaatctggtcgcctgggaaacaagcccttccgtgtactcgggaatccggcacaaggcactgggctacgtgctggacagaatcattgatcagcgattcgagaaggtttcctacttcgtatttggtgatttcaacttccggctggattccaagtccgtcgtggaggtaggcgctggcttccctcccgccctggtctcatgccttgctctgtgttgaggaaaacagtggaaggagcgtggccccttactggcactttcaatgccatccgcctcccgggatgcactttttaaggcaaacctttnncatgagaagcatgttttgctgtncgcagagggatcccgtgtgaatcccgggtgcgcgggcctcaggntgccccgnnatgcggtgacatgctgtgggcttgccctgtnngctcgcgtcgcacacaggactgcgg

SEQ ID NO: 375 - DNA, 920 bp, human
  misc_feature (706)..(706): n is a, c, g, or t
  misc_feature (796)..(797): n is a, c, g, or t
  misc_feature (837)..(838): n is a, c, g, or t
  misc_feature (841)..(841): n is a, c, g, or t
  misc_feature (843)..(844): n is a, c, g, or t
  misc_feature (897)..(899): n is a, c, g, or t
agatactatgagaggtcgcatcccatcaccatcacggatcctatttaggtgacactatagaatcgtcgactctggaccttggctgtcactcagttaccatggcctatatcatgctctgtcggaagacatcccaacaagagcatgtctacgaagcagccagggcacatgccagagaggccaacgactctggagaaaccatgagggtggccatcttcgcaagtggctgctccagtgatgagccaacttcccagaatctgggcaacaactactctgatgagccctgcataggacaggagtaccagatcatcgcccagatcaatggcaactacgcccgcctgctggacacagttcctctggattatgagtttctggccactgagggcaaaagtgtctgttaaaaatgccccattaggccaggatctgctgacataattgcctagtcagtccttgccttctgcatggccttcttccctgctacctctcttcctggatagcccaaagtgtccgcctaccaacactggagccgctgggagtcactggctttgccctggaatttgccagatgcatctcaagtaagccagctgctggatttggctctgggcccttctagtatctctgccgggggcttctggtactcctctctaaataccagagggaagatgcccatagcactaggacttggtcatcatgcctacagacactattncactttggcatcttgccaccagaagacccgagggaggctcagctctgccagctcagaagaccagctatatccagaatcatttctctttcnntcagggcagacagcttttaattttgaatgtatttcacagnncangnntcagtctgctcctccactatagtctaatgtctgactctctctggtgctcatannntatctatctacgcaaaaaaaa

SEQ ID NO: 376 - DNA, 934 bp, human
agaggatcgcatcaccatcaccatcacggatcctatttaggtgacactatagaatcgtcgacccacgcgtccgggaagaactggagaaaaggaaggatgaaattgaacgagaagttctccgaagggtggaggaagccaaacgcatcatggaaaagcagttgctcgaagaactcgagcgacagagacaagctgagcttgccgcacaaaaagctagagagaggaagctggcgcgtatggcagccgaggagcacactctgcaggacactggacaagacagaggaagaacgtgcaaaacgtgaggagctagagcgaatactggaagagaataaccgaaaaattgcagaagcacaagccaaactggccgaagaacagttgagaattgttgaagaacaaagaaagattcatgaggaaaggatgaaactagaacaagaacgacaacgtcaacaaaaagaagaacaaaaaattatcctgggcaaggggaagtccaggccaaaactgtccttctcattaaaaacccaggattaaattgcaaactctgaactttttacaaagaaaaatggaaaaactttgtatggtagcttcatgttgaagtggttttttgtttttgtttttgtttttttaatttgtaaaatctggaaagttagcttgttctaataggggctatgctctgcaattcccttttttttttttttttccttccactaagtcaaatccttatcagatcattgttgtattctaaggagtgacgtatttttcacctgtttggattctatattagtggtctgaggaagagcagatcacattgtaaaactatggatggtctgataaggcttttactgaccccactgacttcagagttatactctgtttgctacatcataatgctggttttgctgactttttgtttttttatatatttaaaaaaaaaagaaaa

SEQ ID NO: 377 - DNA, 1099 bp, human
  misc_feature (15)..(15): n is a, c, g, or t
  misc_feature (739)..(739): n is a, c, g, or t
  misc_feature (775)..(775): n is a, c, g, or t
  misc_feature (803)..(803): n is a, c, g, or t
  misc_feature (815)..(815): n is a, c, g, or t
  misc_feature (839)..(839): n is a, c, g, or t
  misc_feature (843)..(843): n is a, c, g, or t
  misc_feature (865)..(865): n is a, c, g, or t
  misc_feature (890)..(890): n is a, c, g, or t
  misc_feature (893)..(893): n is a, c, g, or t
  misc_feature (905)..(905): n is a, c, g, or t
  misc_feature (915)..(915): n is a, c, g, or t
  misc_feature (929)..(929): n is a, c, g, or t
  misc_feature (934)..(934): n is a, c, g, or t
  misc_feature (937)..(937): n is a, c, g, or t
  misc_feature (960)..(960): n is a, c, g, or t
  misc_feature (972)..(972): n is a, c, g, or t
  misc_feature (974)..(974): n is a, c, g, or t
  misc_feature (981)..(981): n is a, c, g, or t
  misc_feature (985)..(985): n is a, c, g, or t
  misc_feature (987)..(987): n is a, c, g, or t
  misc_feature (995)..(995): n is a, c, g, or t
  misc_feature (1004)..(1004): n is a, c, g, or t
  misc_feature (1007)..(1007): n is a, c, g, or t
  misc_feature (1012)..(1012): n is a, c, g, or t
  misc_feature (1023)..(1023): n is a, c, g, or t
  misc_feature (1031)..(1031): n is a, c, g, or t
  misc_feature (1033)..(1033): n is a, c, g, or t
  misc_feature (1035)..(1035): n is a, c, g, or t
  misc_feature (1037)..(1037): n is a, c, g, or t
  misc_feature (1046)..(1046): n is a, c, g, or t
  misc_feature (1053)..(1053): n is a, c, g, or t
  misc_feature (1058)..(1058): n is a, c, g, or t
  misc_feature (1069)..(1069): n is a, c, g, or t
  misc_feature (1074)..(1074): n is a, c, g, or t
  misc_feature (1077)..(1078): n is a, c, g, or t
  misc_feature (1081)..(1081): n is a, c, g, or t
  misc_feature (1090)..(1090): n is a, c, g, or t
  misc_feature (1098)..(1098): n is a, c, g, or t
aattagagaaattanctatgagaggatcgcatcaccatcaccatcacggatcctatttaggtgacactatagaatcgtcgacccacgcgtccgtgcagagcaatgacgaggtgttggctgaggtgacttcgtgggacctgcccccgttgactgaccgctaccgcagggcctgccagagcctggggcaaggggagcaccaacaggtgctgcaggccgtggagctccagggcttgggcctctcgttcagcgcctgctccctggccctggaccaggcccagcttacacccctgctgcgggccctcaagctgcacacagcactccgggagctgcgcctggcagggaaccggctgggggacaagtgtgtggctgagctggtggctgccctgggcaccatgcccagcctggccctccttgacctctcctccaatcacctgggtcccgaaggcctgcgccagcttgccatggggctcccaggccaagccaccttgcagagtttggaggagctggacttaagcatgaaccccctgggggacggctgtggccagtccctggcctccctcctgcacgcctgccccttactcagcaccctgcgcctgcaggcgtgtggcttcggccccagcttctttctgagccaccagacagcactgggtagtgctttccaagatgctgagcacctgaagaccctgtccctgtcctacaacgccctgggagcccctgccctggccaggaccctgcagancctgcccgccggcaccctcctgcacttaaagctcanctccgtggcagccggcaagggtgattcngacctcatggancctgtattccgatacctggccaangaangctgtgctctaacccacctgancctgtctgcaaaccacctggggganaangctgttaaaaanctgtgcaaangtctctctctgtgnccctncantcatctcactggatttgtctgcnaaccctgaaatnanctgtgcnactngnaaaactcntgtccaccntcnaaaancggccccaagncttaactncntngnctgtcaggntgccccntcaanggtccctgggnctggnctnnggnaaaaaaaancccccaant

SEQ ID NO: 378 - DNA, 1262 bp, human
  misc_feature (738)..(739): n is a, c, g, or t
  misc_feature (749)..(749): n is a, c, g, or t
  misc_feature (752)..(757): n is a, c, g, or t
  misc_feature (759)..(759): n is a, c, g, or t
  misc_feature (762)..(768): n is a, c, g, or t
  misc_feature (820)..(820): n is a, c, g, or t
  misc_feature (839)..(839): n is a, c, g, or t
  misc_feature (874)..(874): n is a, c, g, or t
  misc_feature (894)..(894): n is a, c, g, or t
  misc_feature (897)..(897): n is a, c, g, or t
  misc_feature (915)..(915): n is a, c, g, or t
  misc_feature (920)..(920): n is a, c, g, or t
  misc_feature (941)..(941): n is a, c, g, or t
  misc_feature (947)..(947): n is a, c, g, or t
  misc_feature (985)..(985): n is a, c, g, or t
  misc_feature (995)..(995): n is a, c, g, or t
  misc_feature (998)..(998): n is a, c, g, or t
  misc_feature (1015)..(1015): n is a, c, g, or t
  misc_feature (1024)..(1024): n is a, c, g, or t
  misc_feature (1041)..(1041): n is a, c, g, or t
  misc_feature (1050)..(1050): n is a, c, g, or t
  misc_feature (1062)..(1062): n is a, c, g, or t
  misc_feature (1072)..(1072): n is a, c, g, or t
  misc_feature (1078)..(1078): n is a, c, g, or t
  misc_feature (1082)..(1082): n is a, c, g, or t
  misc_feature (1089)..(1089): n is a, c, g, or t
  misc_feature (1107)..(1107): n is a, c, g, or t
  misc_feature (1122)..(1122): n is a, c, g, or t
  misc_feature (1130)..(1130): n is a, c, g, or t
  misc_feature (1134)..(1134): n is a, c, g, or t
  misc_feature (1138)..(1138): n is a, c, g, or t
  misc_feature (1142)..(1142): n is a, c, g, or t
  misc_feature (1145)..(1145): n is a, c, g, or t
  misc_feature (1159)..(1159): n is a, c, g, or t
  misc_feature (1163)..(1163): n is a, c, g, or t
  misc_feature (1165)..(1166): n is a, c, g, or t
  misc_feature (1191)..(1191): n is a, c, g, or t
  misc_feature (1207)..(1207): n is a, c, g, or t
  misc_feature (1211)..(1211): n is a, c, g, or t
  misc_feature (1217)..(1218): n is a, c, g, or t
  misc_feature (1233)..(1233): n is a, c, g, or t
  misc_feature (1237)..(1237): n is a, c, g, or t
  misc_feature (1241)..(1241): n is a, c, g, or t
  misc_feature (1243)..(1243): n is a, c, g, or t
tagagaaattactatgagaggatcgcatcaccatcaccatcacggatcctatttaggtgacactatagaatcgtcgacccacgcgtccgggctgccgaagatggcggaggtgcaggtcctggtgcttgatggtcgaggccatctcctgggccgcctggcggccatcgtggctaaacaggtactgctgggccggaaggtggtggtcgtacgctgtgaaggcatcaacatttctggcaatttctacagaaacaagttgaagtacctggctttcctccgcaagcggatgaacaccaacccttcccgaggcccctaccacttccgggcccccagccgcatcttctggcggaccgtgcgaggtatgctgccccacaaaaccaagcgaggccaggccgctctggaccgtctcaaggtgtttgacggcatcccaccgccctacgacaagaaaaagcggatggtggttcctgctgccctcaaggtcgtgcgtctgaagcctacaagaaagtttgcctatctggggcgcctggctcacgaggttggctggaagtaccaggcagtgacagccaccctggaggagaagaggaaagagaaagccaagatccactaccggaagaagaaacagctcatgaggctacggaaacaggccgagaagaacgtggagaagaaaattgacaaatacacagaggtcctcaagacccacggactcctggtctgagcccaataaagactgttaattcctcnnaaaaaaaaanaannnnnnanaannnnnnnaaaaagggcggccgctccctatagtgagtcgtattaagcttaattagctgancttggactcctgttgatanatccagtaatgacctcaaaactccatctggatttnttcaaaacgctcggttgccnccnggcgtttttattggtganaatcnaagctagcttggcgaaatttncagaanctaaaggaagctaaatggaaaaaaaaaatccctggatnaccaccgttnaanttatcccaatggcatcntaaaaaaanattttgaggcatttcantcagttgcncaatgtaccttnaaaccaaacngttcanctgnaaaatancggcctttttaaaacccntaaaaaaaaaaaccncaattttntccngccntttnttnaattttttcccccngaananncccctccgaaatttctttggcaatnaaaaaagggaactggnaaanggaaannttccccttttaaccntttncaananaaaaaaaattttttccctt

SEQ ID NO: 379 - DNA, 1125 bp, human
  misc_feature (232)..(232): n is a, c, g, or t
  misc_feature (475)..(475): n is a, c, g, or t
  misc_feature (553)..(553): n is a, c, g, or t
  misc_feature (596)..(596): n is a, c, g, or t
  misc_feature (608)..(608): n is a, c, g, or t
  misc_feature (635)..(635): n is a, c, g, or t
  misc_feature (649)..(649): n is a, c, g, or t
  misc_feature (657)..(657): n is a, c, g, or t
  misc_feature (715)..(715): n is a, c, g, or t
  misc_feature (730)..(730): n is a, c, g, or t
  misc_feature (735)..(735): n is a, c, g, or t
  misc_feature (747)..(747): n is a, c, g, or t
  misc_feature (752)..(752): n is a, c, g, or t
  misc_feature (765)..(766): n is a, c, g, or t
  misc_feature (779)..(779): n is a, c, g, or t
  misc_feature (787)..(788): n is a, c, g, or t
  misc_feature (827)..(828): n is a, c, g, or t
  misc_feature (843)..(843): n is a, c, g, or t
  misc_feature (845)..(845): n is a, c, g, or t
  misc_feature (861)..(861): n is a, c, g, or t
  misc_feature (882)..(882): n is a, c, g, or t
  misc_feature (886)..(886): n is a, c, g, or t
  misc_feature (889)..(889): n is a, c, g, or t
  misc_feature (899)..(900): n is a, c, g, or t
  misc_feature (908)..(909): n is a, c, g, or t
  misc_feature (911)..(913): n is a, c, g, or t
  misc_feature (929)..(929): n is a, c, g, or t
  misc_feature (933)..(933): n is a, c, g, or t
  misc_feature (942)..(942): n is a, c, g, or t
  misc_feature (948)..(948): n is a, c, g, or t
  misc_feature (956)..(957): n is a, c, g, or t
  misc_feature (970)..(970): n is a, c, g, or t
  misc_feature (976)..(976): n is a, c, g, or t
  misc_feature (985)..(986): n is a, c, g, or t
  misc_feature (991)..(991): n is a, c, g, or t
  misc_feature (1001)..(1001): n is a, c, g, or t
  misc_feature (1006)..(1006): n is a, c, g, or t
  misc_feature (1008)..(1008): n is a, c, g, or t
  misc_feature (1016)..(1016): n is a, c, g, or t
  misc_feature (1024)..(1024): n is a, c, g, or t
  misc_feature (1032)..(1032): n is a, c, g, or t
  misc_feature (1041)..(1042): n is a, c, g, or t
  misc_feature (1049)..(1050): n is a, c, g, or t
  misc_feature (1052)..(1052): n is a, c, g, or t
  misc_feature (1054)..(1054): n is a, c, g, or t
  misc_feature (1065)..(1065): n is a, c, g, or t
  misc_feature (1067)..(1067): n is a, c, g, or t
  misc_feature (1075)..(1075): n is a, c, g, or t
  misc_feature (1078)..(1078): n is a, c, g, or t
  misc_feature (1090)..(1090): n is a, c, g, or t
  misc_feature (1094)..(1094): n is a, c, g, or t
  misc_feature (1104)..(1105): n is a, c, g, or t
  misc_feature (1116)..(1117): n is a, c, g, or t
gaatagagagattactatgagaggatcgcatcaccatcaccatcacggatcctatttaggtgacactatagaatcgtcgacccacgcgtccgggtttggttgtgagatcgagaataacagaagcagcggagcattctggaaatattactatgatggaaaggactacattgaattcaacaaagaaatcccagcctgggtccccttcgacccagcagcccagataaccaagcanaagtgggaggcagaaccagtctacgtgcagcgggccaaggcttacctggaggaggagtgccctgcgactctgcggaaatacctgaaatacagcaaaaatatcctggaccggcaagatcctccctctgtggtggtcaccagccaccaggccccaggagaaaagaagaaactgaagtgcctggcctacgacttctacccagggaaaattgatgtgcactggactcgggccggcgaggtgcaggancctgagttacggggagatgttcttcacaatggaaatggcacttaccagtcctgggtggtggtggcagtgcccccgcangacacagccccctactcctgccacgtgcagcacagcagcctgncccagcccctcntggtgccctgggaggccagctaggaancaagggttggaggnaatgtggnatctcaaacccagtaagctgcccttcctgcctgatgtgggagctgaaccacagaaatncacatgtcaatgganccacnaggccctgaagnagcantgtgggggggacnnaacaggaggttgnatttggannaccgaaagactgggatgcctgtcttgaagtataacttgnnacccaaaaaaaatcntntcacccttgagccccncccccaccccccttggtctantctngtnagaagctaannaaaataanncnnnccctcctttccctaancaanaaaaatgantaatanactaaaannttattttctactnagggcnggccccccnnccatnaaggagtccncaatnanatcttaantcaccttnatctttgncaccctgtnnaaaaaanncncnaaattgactcncnaacctccnttncgaattgttttnaaanactctcgttnngccccggcgtnnattttttt

SEQ ID NO: 380 - DNA, 1125 bp, human; identical to SEQ ID NO: 379
  misc_feature (232)..(232): n is a, c, g, or t
  misc_feature (475)..(475): n is a, c, g, or t
  misc_feature (553)..(553): n is a, c, g, or t
  misc_feature (596)..(596): n is a, c, g, or t
  misc_feature (608)..(608): n is a, c, g, or t
  misc_feature (635)..(635): n is a, c, g, or t
  misc_feature (649)..(649): n is a, c, g, or t
  misc_feature (657)..(657): n is a, c, g, or t
  misc_feature (715)..(715): n is a, c, g, or t
  misc_feature (730)..(730): n is a, c, g, or t
  misc_feature (735)..(735): n is a, c, g, or t
  misc_feature (747)..(747): n is a, c, g, or t
  misc_feature (752)..(752): n is a, c, g, or t
  misc_feature (765)..(766): n is a, c, g, or t
  misc_feature (779)..(779): n is a, c, g, or t
  misc_feature (787)..(788): n is a, c, g, or t
  misc_feature (827)..(828): n is a, c, g, or t
  misc_feature (843)..(843): n is a, c, g, or t
  misc_feature (845)..(845): n is a, c, g, or t
  misc_feature (861)..(861): n is a, c, g, or t
  misc_feature (882)..(882): n is a, c, g, or t
  misc_feature (886)..(886): n is a, c, g, or t
  misc_feature (889)..(889): n is a, c, g, or t
  misc_feature (899)..(900): n is a, c, g, or t
  misc_feature (908)..(909): n is a, c, g, or t
  misc_feature (911)..(913): n is a, c, g, or t
  misc_feature (929)..(929): n is a, c, g, or t
  misc_feature (933)..(933): n is a, c, g, or t
  misc_feature (942)..(942): n is a, c, g, or t
  misc_feature (948)..(948): n is a, c, g, or t
  misc_feature (956)..(957): n is a, c, g, or t
  misc_feature (970)..(970): n is a, c, g, or t
  misc_feature (976)..(976): n is a, c, g, or t
  misc_feature (985)..(986): n is a, c, g, or t
  misc_feature (991)..(991): n is a, c, g, or t
  misc_feature (1001)..(1001): n is a, c, g, or t
  misc_feature (1006)..(1006): n is a, c, g, or t
  misc_feature (1008)..(1008): n is a, c, g, or t
  misc_feature (1016)..(1016): n is a, c, g, or t
  misc_feature (1024)..(1024): n is a, c, g, or t
  misc_feature (1032)..(1032): n is a, c, g, or t
  misc_feature (1041)..(1042): n is a, c, g, or t
  misc_feature (1049)..(1050): n is a, c, g, or t
  misc_feature (1052)..(1052): n is a, c, g, or t
  misc_feature (1054)..(1054): n is a, c, g, or t
  misc_feature (1065)..(1065): n is a, c, g, or t
  misc_feature (1067)..(1067): n is a, c, g, or t
  misc_feature (1075)..(1075): n is a, c, g, or t
  misc_feature (1078)..(1078): n is a, c, g, or t
  misc_feature (1090)..(1090): n is a, c, g, or t
  misc_feature (1094)..(1094): n is a, c, g, or t
  misc_feature (1104)..(1105): n is a, c, g, or t
  misc_feature (1116)..(1117): n is a, c, g, or t

SEQ ID NO: 381 - DNA, 965 bp, human
tgagaggtcgcatcaccatcaccatcacggatcctatttaggtgacactatagaatcgtcgacccacgcgtccgagaaacctcatgaatgtagtgaatgtgggaaagtctttagccagaggtcccaccttgtcacacaccagaaaatccacactggagagaagccctatcagtgcactgaatgtgaaaaagccttcaggcggcgttcactccttattcaacgtcggagaattcatagtggtgagaaaccctatgaatgtaaggaatgtgggaaactcttcatgtggcacacagctttcctcaaacatcagagactgcatgctggagagaaacttgaagaatgtgagaaaaccttcagcaaggatgaggagcttaggggagagcagaaaattcaccaagaagagaaagcttattggtgtaatcagtgtggtagggctttccagggcagctcagacctcatcggacatcaggtaactcatacaggagagaaaccatatgaatgtaaagaatgtgggaaaactttcaatcagagctcagaccttctgagacatcatagaattcacagtggagaaaaaccttatgtatgcaacaaatgtgggaaatcttttaggggcagctcagatcttattagacaccatcgtgttcatactggagagaaaccctatgaatgccctgaatgttggaaggccttcagtcagaactcacaccttgtcagtcatcaaagaattcataccagagagaaaccctttgaatgtagcaactgtggtaaggccttcagtgggtggacagcttttcttaagcaccagaaacttcacattggaaaggaatttgaagactgtaagagtctacaaacaggacctattctaataggtagcagaacctaatgaatgcagtaaaactaggaaaagtctgatggagaccacatcttattgcactacaaatgagttttattagaaaaaaaccatg

SEQ ID NO: 382 - DNA, 1137 bp, human
  misc_feature (775)..(775): n is a, c, g, or t
  misc_feature (880)..(880): n is a, c, g, or t
  misc_feature (902)..(902): n is a, c, g, or t
  misc_feature (916)..(916): n is a, c, g, or t
  misc_feature (931)..(931): n is a, c, g, or t
  misc_feature (938)..(938): n is a, c, g, or t
  misc_feature (940)..(940): n is a, c, g, or t
  misc_feature (942)..(942): n is a, c, g, or t
  misc_feature (949)..(949): n is a, c, g, or t
  misc_feature (951)..(951): n is a, c, g, or t
  misc_feature (957)..(957): n is a, c, g, or t
  misc_feature (964)..(964): n is a, c, g, or t
  misc_feature (996)..(997): n is a, c, g, or t
  misc_feature (1018)..(1018): n is a, c, g, or t
  misc_feature (1024)..(1024): n is a, c, g, or t
  misc_feature (1031)..(1031): n is a, c, g, or t
  misc_feature (1069)..(1069): n is a, c, g, or t
  misc_feature (1072)..(1073): n is a, c, g, or t
  misc_feature (1075)..(1075): n is a, c, g, or t
  misc_feature (1081)..(1081): n is a, c, g, or t
  misc_feature (1089)..(1089): n is a, c, g, or t
  misc_feature (1105)..(1105): n is a, c, g, or t
  misc_feature (1110)..(1110): n is a, c, g, or t
  misc_feature (1125)..(1125): n is a, c, g, or t
  misc_feature (1129)..(1129): n is a, c, g, or t
  misc_feature (1131)..(1131): n is a, c, g, or t
agagaaattactatgagaggatcgcatcaccatcaccatcacggatcctatttaggtgacactatagaatcgtcgacccacgcgtccggagaaacatcaatggattctcgacttcaaaggatacatgctgagattaaaaattcactcaaaattgataatcttgatgtgaacagatgcattgaggccttggatgaacttgcttcacttcaggtcacaatgcaacaagctcagaaacacacagagatgattactacactgaaaaaaatacggcgattcaaagttagtcaggtaatcatggaaaagtctacaatgttgtataacaagtttaagaacatgttcttggttggtgaaggagattccgtgatcacccaagtgctgaataaatctcttgctgaacaaagacagcatgaggaagcgaataaaaccaaagatcaagggaagaaagggccaaacaaaaagctagagaaggaacaaacagggtcaaagactctaaatggaggatctgatgctcaagatggtaatcagccacaacataacggggagagcaatgaagacagcaaagacaaccatgaagccagcacgaagaaaaagccatccagtgaagagagagagactgaaatatctctgaaggattctacactagataactaggttgacatacctggaatatagagaacacttgagaagtttgtaatggttttcatttgaaatagactgctgaaagttttaaatttttataagcataggtttgatgttgaaaacttgttttgagggnagaaaaatccctttgttttaaagtaaagtaaacattatcgctaagtgtacttgtgcagtattaacagctacattatacagtaaatgtgggataaaatccatttanaaaatgttaaactgcttttccngacatgggttgtancatattttcaattantgtgggnangnttaatgngnaaatgnaaaatanaacaaagttacatttttaaaactgctacttgnnataaacccttgcccccttttnccaaanaactggngggttttgggcatagttttttacaaaccttggaatttnccnnancgggcnttttcccngtttggggggttttgnaaaanttacccctttttttngggnanaaaaaa

SEQ ID NO: 383 - DNA, 816 bp, human
agaggatcgcatcaccatcaccatcacggatcctatttaggtgacactatagaatcgtcgacccacgcgtccgatgagacctattgcattgacaacgaggccctctatgatatctgcttccgcactctgaagctgaccacaccaacctacggggatctgaaccaccttgtctcagccaccatgagtggtgtcaccacctgcctccgtttccctggccagctcaatgctgacctccgcaagttggcagtcaacatggtccccttcccacgtctccatttctttatgcctggctttgcccctctcaccagccgtggaagccagcagtatcgagctctcacagtgccggaactcacccagcaggtcttcgatgccaagaacatgatggctgcctgtgacccccgccacggccgatacctcaccgtggctgctgtcttccgtggtcggatgtccatgaaggaggtcgatgagcagatgcttaacgtgcagaacaagaacagcagctactttgtggaatggatccccaacaatgtcaagacagccgtctgtgacatcccacctcgtggcctcaagatggcagtcaccttcattggcaatagcacagccatccaggagctcttcaagcgcatctcggagcagttcactgccatgttccgccggaaggccttcctccactggtacacaggcgagggcatggacgagatggagttcaccgaggctgagagcaacatgaacgacctcgtctctgagtatcagcagtaccaggatgccaccgcagaagaggaggaggatttcggtgaggaggccgaagaggaggcc

SEQ ID NO: 384 - DNA, 2368 bp, human
atgcctcaggttccgggtggtagcgttaaaccgaaaatcatgtctccggaaaaaagccatcgtgttattagcccgagcagcggttatagcagccagagcaataccccgaccgcactgacaccggttccggtttttctgaaaagcgtttctccggcaaatggtaaaggtaaaccgaaaccgaaagttccggaacgtaaaagcagcctgattagcagcgttagcattagcagcagcagcaccagcctgagcagctctaccagcaccgaaggtagcggcaccatgaaaaaactggaccctgcagttggttctcctccagcaccacctccacctccggttccgagccctccgtttccgtgtccggcagatcgtagcccgtttctgccaccgccaccgcctgttaccgattgtagccagggttctccgctgccgcattctccggtttttccgcctcctccgcctgaagcactgattccgttttgtagccctccggattggtgtctgagtccaccgcgtccggcactgagcccgattctgccggattcaccggtttctctgccgctgcctccgcctctgctgccgtctagtgaacctccacctgcaccaccgctggacccgaaatttatgaaagatacccgtccaccttttaccaatagcggtcagccggaaagcagccgtggtagcctgcgtccgcctagcaccaaagaagaaaccagccgtccgcctatgccgctgattaccaccgaagcactgcagatggttcagctgcgtccggttcgtaaaaatagcggtgcagaagctgcacagctgagcgaacgtaccgcacaggaacagcgtacaccggttgcaccgcagtatcatctgaaaccgagcgcatttctgaaatctcgcaacagcaccaatgaaatggaaagcgaaagccagcctgcaagcgttaccagcagcctgccgacaccggcaaaaagcagcagccagggtgatcatggtagcgcagcagaacgtggtggtccggttagccgttctccgggtgcaccgtctgccggtgaagcagaagcacgtccgagcccgtctaccacaccgctgccggatagcagcccgtcacgtaaaccgcctccgattagcaaaaaaccgaaactgtttctggtcgttccaccaccgcagaaagattttgcagttgaaccggcagaaaatgttagcgaagcactgcgtgcagttccgagcccgaccaccggtgaagaaggtagcgttcatagccgtgaagcaaaagaaagcagcgcagcacaggcaggtagccatgcaacccatccgggtacaagcgttctggaaggtggtgcagcaggtagcatgagcccgagccgtgttgaagcaaatgttccgatggttcagccggatgtttcaccggcaccgaaacaggaagaaccggctgaaaatagcgcagataccggtggagatggtgaaagctgtctgagccagcaggatggtgcagccggtgttccggaaaccaatgcagccggtagcagcagcgaagcatgtgattttctgaaagaagatggcaacgacgaagttatgacccctagccgtccgcgtaccaccgaggacctgtttgcagcaattcatcgtagcaaacgtaaagttctgggtcgtcgtgattctgatgatgaccatagccgtaatcactctccgtcaccaccggttacaccgaccggtgcagcaccaagcctggcaagcccgaaacaggttggtagcattcagcgtagcattcgtaaaagctcaaccagcagcgataattttaaagccctgctgctgaaaaaaggtagccgtagcgataccagcgcacgtatgagcgcagccgaaatgctgaaaaataccgatccgcgttttcagcgtagccgttctgaaccgtcaccggatgcaccggaaagcccgagcagttgtagcccgagcaaaaatcgtcgtgcacaggaagaatgggcaaaaaacgaaggtctgatgcctcgtagcctgtcatttagcggtccgcgttatggtcgtagccgtacccctccgagcgcagcaagcagccgttattctatgcgtaatcgtattcagagcagcccgatgaccgttattagcgaaggtgaaggtgaagccgttgaaccggttgatagcattgcacgtggtgcactgggtgcagcagaaggttgtagcctggacggtctggcacgtgaagaaatggatgaaggtggtctgctgtgtggtgaaggtccggcagcaagcctgcagcctcaggcaccgggtccggttgatggcaccgcaagcgcagaaggtcgcgaaccgagtccgcagtgtggtggtagcctgtccgaagaaagctaagcggccgcttaattaa

SEQ ID NO: 385 - DNA, 826 bp, human
  misc_feature (714)..(714): n is a, c, g, or t
  misc_feature (747)..(748): n is a, c, g, or t
  misc_feature (784)..(784): n is a, c, g, or t
gatagagagatactatgagaggtcgcatcccatcaccatcacggatcctatttaggtgacactatagaatcgtcgactctggaccttggctgtcactcagttgatccggtgctgtgcacactggtgggggagagtccgacgcgcctggctaggagcgccgaccgcagggcctctacggaccttactagaaaaatgaaacctgatgaaactcctatgtttgacccaagtctactcaaagaagtggactggagtcagaatacagctacattttctccagccatttccccaacacatcctggagaaggcttggttttgaggcctctttgtactgctgacttaaatagaggtttttttaaggtattgggtcagctaacagagactggagttgtcagccctgaacaatttatgaaatcttttgagcatatgaagaaatctggggattattatgttacagttgtagaagatgtgactctaggacagattgttgctacggcaactctgattatagaacataaattcatccattcctgtgctaagagaggaagagtagaagatgttgttgttagtgatgaatgcagaggaaagcagcttggcaaattgttattatcaacccttactttgctaagcaagaaactgaactgttacaagattacccttgaatgtctaccacaaaatgttggtttctataaaaagtttggatatactgtatctgangaaaactacatgtgtcggaagtttctaaagtannaatctttgtagaaattgtcaaaggggctaatgctancaggctacactcttcctagagtgaaatattttgtgctgcagc

SEQ ID NO: 386 - DNA, 1053 bp, human
  misc_feature (857)..(857): n is a, c, g, or t
  misc_feature (958)..(958): n is a, c, g, or t
  misc_feature (960)..(960): n is a, c, g, or t
  misc_feature (972)..(972): n is a, c, g, or t
  misc_feature (991)..(991): n is a, c, g, or t
  misc_feature (997)..(997): n is a, c, g, or t
  misc_feature (1012)..(1012): n is a, c, g, or t
  misc_feature (1015)..(1015): n is a, c, g, or t
  misc_feature (1021)..(1022): n is a, c, g, or t
  misc_feature (1025)..(1025): n is a, c, g, or t
  misc_feature (1031)..(1031): n is a, c, g, or t
  misc_feature (1033)..(1034): n is a, c, g, or t
  misc_feature (1036)..(1036): n is a, c, g, or t
  misc_feature (1039)..(1039): n is a, c, g, or t
  misc_feature (1052)..(1052): n is a, c, g, or t
atagagagattaactatgagaggatcgcatcaccatcaccatcacggatcctatttaggtgacactatagaatcgtcgacccacgcgtccggaaagaagcagtctgatgtcatgcgctttcttctgagggtccgctgctggcagtaccgccagctctctgctctccacagggctccccgccccacccggcctgataaagcgcgccgactgggctacaaggccaagcaaggttacgttatatataggattcgtgttcgccgtggtggccgaaaacgcccagttcctaagggtgcaacttacggcaagcctgtccatcatggtgttaaccagctaaagtttgctcgaagccttcagtccgttgcagaggagcgagctggacgccactgtggggctctgagagtcctgaattcttactgggttggtgaagattccacatacaaattttttgaggttatcctcattgatccattccataaagctatcagaagaaatcctgacacccagtggatcaccaaaccagtccacaagcacagggagatgcgtgggctgacatctgcaggccgaaagagccgtggccttggaaagggccacaagttccaccacactattggtggctctcgccgggcagcttggagaaggcgcaatactctccagctccaccgttaccgctaatataagtaaagtttgtaaaattcatacttaataaacaatttaggacagtcatgtctgcttacaggtgttatttgtctgttaaaactagtctgcagatgtttcttgaatgctttgtcaaattaagaaagttaaagtgcaataatgtttgaagacaataagtggtggtgtatcttgtttctaataanataaacttttttgtctttgctttatcttattagggagttgtatgtcagtgtataaaacatactgtgtggtataacaggcttaataaattctttaaaaggananaactgaaactanccctgtaaatttgtctggngcatgngaagaaacctgcacnttntcggannganggcaangnncngcnggtttattttcang

SEQ ID NO: 387 - DNA, 1179 bp, human
  misc_feature (855)..(855): n is a, c, g, or t
  misc_feature (922)..(922): n is a, c, g, or t
  misc_feature (958)..(958): n is a, c, g, or t
  misc_feature (964)..(964): n is a, c, g, or t
  misc_feature (989)..(989): n is a, c, g, or t
  misc_feature (992)..(992): n is a, c, g, or t
  misc_feature (1000)..(1000): n is a, c, g, or t
  misc_feature (1003)..(1003): n is a, c, g, or t
  misc_feature (1006)..(1006): n is a, c, g, or t
  misc_feature (1010)..(1010): n is a, c, g, or t
  misc_feature (1015)..(1015): n is a, c, g, or t
  misc_feature (1021)..(1021): n is a, c, g, or t
  misc_feature (1050)..(1050): n is a, c, g, or t
  misc_feature (1055)..(1055): n is a, c, g, or t
  misc_feature (1062)..(1062): n is a, c, g, or t
  misc_feature (1067)..(1067): n is a, c, g, or t
  misc_feature (1070)..(1070): n is a, c, g, or t
  misc_feature (1073)..(1073): n is a, c, g, or t
  misc_feature (1080)..(1080): n is a, c, g, or t
  misc_feature (1090)..(1090): n is a, c, g, or t
  misc_feature (1097)..(1097): n is a, c, g, or t
  misc_feature (1109)..(1109): n is a, c, g, or t
  misc_feature (1112)..(1112): n is a, c, g, or t
  misc_feature (1115)..(1115): n is a, c, g, or t
  misc_feature (1124)..(1125): n is a, c, g, or t
  misc_feature (1140)..(1140): n is a, c, g, or t
  misc_feature (1143)..(1144): n is a, c, g, or t
  misc_feature (1151)..(1151): n is a, c, g, or t
  misc_feature (1161)..(1161): n is a, c, g, or t
  misc_feature (1169)..(1169): n is a, c, g, or t
tagagaaattactatgagaggatcgcatcaccatcaccatcacggatcctatttaggtgacactatagaatcgtcgacccacgcgtccgtgggcccggccttcaggggcgctccccgccccgggcttccccgcggaagggagtggggcgcgcgtacccagctgaggggcagggtccgacccgaggccgtgtgcaaatgcatccttcgcggactctttgtgtgtctgagcgcggctccgcgccgccgcaggcaccattttctgcttcgctcaggacaggcacataaaaggaaggcggctgccgcccgtcgccgtcctcttttcctcagatgccctctgctgcaggtgtagagaggagagagagtgaacagggagcggggcttttgtctgttggtctccctggactgaagagagggagaatagaagcccaagactaagattctcaaaatggtttattacccagaactctttgtctgggtcagtcaagaaccatttccaaacaaggacatggagggaaggcttcctaagggaagacttcctgtcccaaaggaagtgaaccgcaagaagaacgatgagacaaacgctgcctccctgactccactgggcagcagtgaactccgctccccaagaatcagttacctccactttttttaatcgtaacacctccatttgtattacatatggtgtatgggtattgatgaggtcatggtatcatatatgggatttttttctgtgtaaatcatcaagtataagaagaaactatgggactctgagccttgctttagagaatttacagtggacaaataggtgtcatcaaaccagtttttaatcattctgactcaagtgaaaacgctcanaatttcacactgtgaatccacgtttacaacccttacaggtgggccttcaggcctggttcgctacaanaatgtcttccacaactcaaatccccaccgcgctcanacaacnggtccactcctgccttttcactcanaanctcccgantgnttnttgnaaagntgaaantcccccccccccccctttttttttctttnaaatnaaaaaanccaanaanttnaggtccnccaattggcnggaaatncccaaattttanccnggnacccttttnnaggaaaaaaaaaaanttnnaaacccnttttttcctnggggaaantgacccaaaa

SEQ ID NO: 388 - DNA, 1169 bp, human
  misc_feature (821)..(821): n is a, c, g, or t
  misc_feature (908)..(908): n is a, c, g, or t
  misc_feature (994)..(994): n is a, c, g, or t
  misc_feature (1011)..(1011): n is a, c, g, or t
  misc_feature (1022)..(1022): n is a, c, g, or t
  misc_feature (1024)..(1024): n is a, c, g, or t
  misc_feature (1048)..(1048): n is a, c, g, or t
  misc_feature (1050)..(1050): n is a, c, g, or t
  misc_feature (1071)..(1071): n is a, c, g, or t
  misc_feature (1077)..(1078): n is a, c, g, or t
  misc_feature (1080)..(1080): n is a, c, g, or t
  misc_feature (1109)..(1109): n is a, c, g, or t
  misc_feature (1111)..(1111): n is a, c, g, or t
  misc_feature (1117)..(1117): n is a, c, g, or t
  misc_feature (1119)..(1119): n is a, c, g, or t
  misc_feature (1125)..(1125): n is a, c, g, or t
  misc_feature (1130)..(1130): n is a, c, g, or t
  misc_feature (1133)..(1133): n is a, c, g, or t
  misc_feature (1135)..(1135): n is a, c, g, or t
  misc_feature (1138)..(1138): n is a, c, g, or t
  misc_feature (1141)..(1141): n is a, c, g, or t
  misc_feature (1152)..(1152): n is a, c, g, or t
  misc_feature (1158)..(1158): n is a, c, g, or t
  misc_feature (1160)..(1160): n is a, c, g, or t
  misc_feature (1163)..(1163): n is a, c, g, or t
attagagaaattactatgagaggatcgcatcaccatcaccatcacggatcctatttaggtgacactatagaatcgtcgacccacgcgtccggtctaaataactcagaccatgaccggcttcataccttggtaactgaacactgttttccagacatgacttgggacatcaaatataagaccgtccgctggagctttgtggaatctttagagccctctcatgttgttcaagttcgctgttcaagtatgatgaaccagggcaacgtgtacggccagatcaccgtacgcatgcacacccggcagactctggccatctatgaccggtttggccggttgatgtatggacaggaagatgtacccaaggatgtcctggagtatgttgtattcgaaaagcagttgacaaacccctatggaagctggagaatgcataccaagatcgttcccccatgggcaccccctaagcagcccatccttaagacggtgatgatccctggccctcagctgaaaccagaagaagaatatgaagaggcacaaggagaggcccagaagcctcagctagcctgatgacaaaaatgacttctagggtgaagcctgggtgatgaggctgctggaagctttgaagtctcccattcccctcatgctataaaaagaactacctttgttctctcccatcctgctcaggtcttttcagcagtctcatcatcagcaaccatgactgatgactgggccctagcaggtggcaggtataacatggccatggacactcttcttttttaaattttatgtctagcttctgagtctagatgaaagacagtatgtttcanagaacattggatatcagtttttcccacagcagggactgtgagagacaaccagcagcatcctctttgtaatcacagggcagggatcanagtttgaaatgaaatgttgtcagggtgttggaaaaattttggtgagttctgcacatttcccctggttcaggctgggcatggaccanccttcaaatggcaaaantggaaaatgancntacttgtgagcgatgtgactttangnaaatgaaaactggggaaaaanaattanngntttataaaaaatttaaaaggccctttttncnaaaacngnctcccnggagnaancnccnttngctttttaggnaaaaananaantcccaa

SEQ ID NO: 389 - DNA, 869 bp, human
actatgagaggtcgcatcaccatcaccatcacggatcctatttaggtgacactatagaatcgtcgactctggaccttggctgtcactcagttaccaaggtggacaagagagttgagcccaaatcttgtgacaaaactcacacatgcccaccgtgcccagcacctgaactcctggggggaccgtcagtcttcctcttccccccaaaacccaaggacaccctcatgatctcccggacccctgaggtcacatgcgtggtggtggacgtgagccacgaagaccctgaggtcaagttcaactggtacgtggacggcgtggaggtgcataatgccaagacaaagccgcgggaggagcagtacaacagcacgtaccgtgtggtcagcgtcctcaccgtcctgcaccaggactggctgaatggcaaggagtacaagtgcaaggtctccaacaaagccctcccagcccccatcgagaaaaccatctccaaagccaaagggcagccccgagaaccacaggtgtacaccctgcccccatcccgggaggagatgaccaagaaccaggtcagcctgacctgcctggtcaaaggcttctatcccagcgacatcgccgtggagtgggagagcaatgggcagccggagaacaactacaagaccacgcctcccgtgctggactccgacggctccttcttcctctatagcaagctcaccgtgaaacaaagcaggtggcagcaagggaacgtcttctcatgctccgtgatgcatgaggctctgcacaaacactacacgcagaagagcctctccctgtccccgggtaatgaatgccacggcggcaagccccgctcccgggctctcccgtcccacaagatgcttgccagt

SEQ ID NO: 390 - DNA, 1245 bp, human
agactatactgacttacctataaaataggcgtatcacgaggccctttcgtcttcacctcgagaaatcataaaaaatttatttgctttgtgagcggataacaattataatagattcaattgtgagcggataacaatttcacacagaattcattaaagaggagaaattaactatgagaggatcgcatcaccatcaccatcacggtcgacccacgcgtccgcggacgcgtgggctggcacagccagggcggtccctgagactctcctgcacaacttctggattcatttttggtgattatgatatgagttgggtccgccaggctccagggaaggggctggagttcatagctttcataagaagcaaaacttatggtgcgacaacacaatacgccgcgtctgtggaaggcagattcaccatctcaagagatgattccagaagcatcgtctatctgcaaatgaacagcctgaaaaccgaggacgcagccatatatttctgtactagaggacgcgccattcttgactactggggccatggatccctggtcaccgtctcctcagcctccaccaagggcccatcggtcttccccctggcaccctcctccaagagcacctctgggggcacagcggccctgggctgcctggtcaaggactacttccccgaaccggtgacggtgtcgtggaactcaggcgccctgaccagcggcgtgcacaccttcccggctgtcctacagtcctcaggactctactccctcagcagcgtggtgaccgtgccctccagcagcttgggcacccagacctacatctgcaacgtgaatcacaagcccagcaacaccaaggtggacaagagagttgagccccaatcttgtgaaaaaactcccacatgccccccgtggccagcacctgaactcctgggggggaccgtcagtcttcctcttccccccaaaacccagggcaccctcatgatctcccgggacccctgaggtcccatgccttggggggggacttgaacccccaaaaaaccctgagggcaagttcaactggtaacgggaacgggcgggaagggccataatgccaaaaaaagcccgcgggaggaacagaaaaaccacccgtaccgggggggtcaacgcctcaccgtcctgcccacaaaatggggtgagggcaaggaaaaaaaggccaagggctcccaaaaaggcctcccccccccccatccaaaaaaaatctctcaaaccaatagggaacccctaaaaa

SEQ ID NO: 391 - DNA, 1857 bp, human
atgaaagttgccggtggtctggaactgggtgcagcagcactgctgagcgcaagtccgcgtgcactggttaccctgagcaccggtccgacctgtagcattctgccgaaaaatccgctgtttccgcagaatctgagcagccagccgtgcattaaaatggaaggtgataaaagcctgacctttagcagctatggtctgcagtggtgtctgtatgaactggataaagaagaatttcagacctttaaagaactgctgaaaaaaaaaagcagcgaaagcaccacctgtagtattccgcagtttgaaattgaaaatgccaatgttgaatgtctggcactgctgctgcatgaatattatggtgcaagcctggcatgggcaaccagcattagcatttttgaaaatatgaatctgcgcaccctgagcgaaaaagcacgtgatgatatgaaacgtcatagtccggaagatccggaagcaaccatgaccgatcagggtccgagcaaagaaaaagttccgggtattagccaggcagttcagcaggatagcgcaaccgcagcagaaaccaaagaacaagaaattagtcaggccatggaacaagaaggtgccacagcagccgaaacagaggaacaagagatttcacaagcaatggaacaagagggtgcaactgccgcagaaacggaagaacagggtcatggtggtgatacctgggattacaaaagccatgttatgaccaaatttgccgaagaggaagatgttcgtcgtagctttgaaaacaccgcagccgattggcctgaaatgcagaccctggcaggcgcatttgatagcgatcgttggggttttcgtccgcgtaccgttgttctgcatggtaaaagcggtattggtaaaagtgcactggcacgtcgtattgttctgtgttgggcacagggtggtctgtatcagggtatgtttagctatgttttttttctgccggttcgcgaaatgcagcgtaaaaaagaaagctcagttaccgaatttatcagccgtgaatggcctgatagtcaggcaccggtgaccgaaattatgagtcgtccggaacgtctgctgtttattatcgatggttttgatgatctgggtagcgtgctgaataatgataccaaactgtgtaaagactgggcagagaaacagcctccgtttaccctgattcgtagcctgctgcgtaaagttctgctgccggaaagttttctgattgttaccgttcgtgatgttggcaccgaaaaactgaaaagcgaagttgttagtccgcgttatctgctggttcgtggtattagcggtgaacagcgtattcatctgctgctggaacgtggcattggtgaacaccagaaaacccagggcctgcgtgcaattatgaataatcgtgaactgctggatcagtgtcaggttccggcagttggtagcctgatttgtgttgcactgcaactgcaggatgttgttggtgaaagcgttgcaccgtttaatcagacactgaccggtctgcacgcagcatttgtttttcatcagctgacaccgcgtggtgttgtgcgtcgttgtctgaatctggaagaacgtgttgttctgaaacgtttttgtcgtatggcagttgaaggtgtgtggaatcgtaaaagcgtttttgatggtgatgacctgatggttcagggtctgggtgaaagtgaactgcgtgccctgttccatatgaatattctgctgcctgatagccattgcgaagagtattataccttttttcatctgagcctgcaggatttttgtgcagcactgtattatgttctggaaggcagatcttaagcggccgcctgggcctcatgggccttcctttcactgcccgctttccag

SEQ ID NO: 392 - DNA, 1387 bp, human
  misc_feature (1)..(3): n is a, c, g, or t
nnncaagtgtcgggacccgcggaatactagagaggatgcatcaccatcaccatcacggtcgacccacgcgtccgaagatggcggaggtgggggagataatcgagggctgccgcctacccgtgctgcggcggaaccaggacaacgaagatgagtggcccctggccgagatcctgagcgtgaaggacatcagtggccggaagcttttctacgtccattacattgacttcaacaaacgtctggatgaatgggtgacgcatgagcggctggacctaaagaagatccagttccccaagaaagaggccaagacccccactaagaacggacttcctgggtcccgtcctggctctccagagagagaggtgaaacggaaggtggaggtggtttcaccagcaactccagtgcccagcgagacagccccggcctcggtttttccccagaatggagccgcccgtagggcagtggcagcccagccaggacggaagcgaaaatcgaattgtttgggcactgatgaggactcccaggacagctctgatggaataccgtcagcaccacgcatgactggcagcctggtgtctgatcgaagccacgacgacatcgtcacccggatgaagaacattgagtgcattgagctgggccggcaccgcctcaagccgtggtacttctccccgtacccacaggaactcaccacattgcctgtcctctacctgtgcgagttctgcctcaagtacggccgtagtctcaagtgtcttcagcgtcatttgaccaagtgtgacctacgacatcctccaggcaatgagatttaccgcaagggcaccatctccttctttgagattgatggacgtaagaacaagagttattcccagaacctgtgtcttttggccaagtggttccttgaccataagacactgtactatgacacagaccctttcctcttctacgtcatgacagagtatgactgtaagggcttcacatcgtgggctacttctcaaggagaaagatcaacgggagactacaatgtggcctgcatcctaacctggctccctacagcgccggggctacgcaagctgctgatcaagtcagctatgactctccaagtggaagggaaacagggacccctgaaacccctctcaacttggcctccatctatcgaactatgtcccaacatcctgaaaccttaagggcttaatcggaaaccgggaagcccaaacccctcctgggatagggaaccccgcctccaaggggtggttctccctcgaaaaccaatctcaaatataagggcggaatcctcccgttaaaaaccggggggccttaggcttctacggcccgggacacacagggcttccccggggagagaaagggggtggccacacccccttgtcaaagcagg

SEQ ID NO: 393 - DNA, 1146 bp, human
  misc_feature (11)..(11): n is a, c, g, or t
  misc_feature (13)..(13): n is a, c, g, or t
  misc_feature (841)..(841): n is a, c, g, or t
  misc_feature (866)..(866): n is a, c, g, or t
  misc_feature (911)..(911): n is a, c, g, or t
  misc_feature (916)..(916): n is a, c, g, or t
  misc_feature (918)..(918): n is a, c, g, or t
  misc_feature (931)..(931): n is a, c, g, or t
  misc_feature (933)..(933): n is a, c, g, or t
  misc_feature (970)..(970): n is a, c, g, or t
  misc_feature (974)..(974): n is a, c, g, or t
  misc_feature (989)..(989): n is a, c, g, or t
  misc_feature (992)..(992): n is a, c, g, or t
  misc_feature (999)..(999): n is a, c, g, or t
  misc_feature (1026)..(1026): n is a, c, g, or t
  misc_feature (1034)..(1035): n is a, c, g, or t
  misc_feature (1038)..(1038): n is a, c, g, or t
  misc_feature (1040)..(1040): n is a, c, g, or t
  misc_feature (1054)..(1054): n is a, c, g, or t
  misc_feature (1057)..(1057): n is a, c, g, or t
  misc_feature (1063)..(1063): n is a, c, g, or t
  misc_feature (1069)..(1069): n is a, c, g, or t
  misc_feature (1085)..(1086): n is a, c, g, or t
  misc_feature (1090)..(1090): n is a, c, g, or t
  misc_feature (1094)..(1096): n is a, c, g, or t
  misc_feature (1100)..(1100): n is a, c, g, or t
  misc_feature (1105)..(1105): n is a, c, g, or t
  misc_feature (1107)..(1107): n is a, c, g, or t
  misc_feature (1116)..(1116): n is a, c, g, or t
  misc_feature (1120)..(1120): n is a, c, g, or t
  misc_feature (1127)..(1127): n is a, c, g, or t
  misc_feature (1130)..(1130): n is a, c, g, or t
  misc_feature (1138)..(1138): n is a, c, g, or t
  misc_feature (1142)..(1142): n is a, c, g, or t
taattagagananttactatgagaggatcgcatcaccatcaccatcacggatcctatttaggtgacactatagaatcgtcgacccacgcgtccggcctggggagccgtcttggcctgcgcgggtgcttcggcgccgccaggctcctgtatccccgtttccagagccgcggccctcagggcgtggaagacggggacaggccacagccttcctcgaagacacccaggatccccaagatttacaccaaaacgggagacaaagggttttctagtaccttcacaggagaaaggagacccaaagatgaccaagtgtttgaagccgtgggaactacagatgaattaagttcagctattgggtttgctctggaattagtcacagaaaagggccatacatttgccgaagagcttcagaaaatccagtgcacattgcaggacgtcggctcggccctggcgacaccatgctcctcggcccgggaggctcacttaaagtataccacgttcaaggcggggcccatcctggagctggagcagtggatcgacaagtacaccagccagctcccaccactcacggccttcatcctgccttcgggaggcaagatcagctcggcgctgcatttctgccgggccgtgtgccgccgggccgagagacgtgtggtgcctcttgtccagatgggagagaccgatgcgaacgtggccaagttcttaaacagactcagtgactatctcttcacgctagccagatatgcagccatgaaggaggggaatcaagagaaaatatacaagaaaaatgacccatcggccgagtctgagggactctgaaatcacagaaagtgggagcttggangatccctccatggcgatggccgtgnaaagagaaacttgcccttctggggtcctggttcctgaagagctcncccananaggctcaaagcancntttttgtcccagcctcagcttttgatttacccttctngccnccttcctcaagggantgnggaaccntttggggatttttgtccctgaacctgnttcccaannttncntgggttttggaagnatngggaantaattnggctttgcagaaaaannggtnaatnnnttgntccantnaaaagaacntggngaaaaanaanaaatttgnaagngtgg

SEQ ID NO: 394 - DNA, 1296 bp, human
  misc_feature (1207)..(1207): n is a, c, g, or t
  misc_feature (1246)..(1247): n is a, c, g, or t
  misc_feature (1254)..(1254): n is a, c, g, or t
  misc_feature (1275)..(1275): n is a, c, g, or t
  misc_feature (1281)..(1281): n is a, c, g, or t
  misc_feature (1284)..(1290): n is a, c, g, or t
ccccccttaggggataccatgagaggatgcatcaccatcaccatcacggtcgacccacgcgtccggccatatcgagcaccgtcacctccagccagggcacagcacccaccggctttgtgtttggcccctccaccacctctgtggctccagctaccacatctggaggcttctcattcactggtggaagcacggcccaaccctccggtttcaacattggctcagcagggaattcagcccagcccacggcacctgccacgttgcccttcactccggccacgccagcagccaccacagcaggtgccacacagccagctgctcccacacccacagccaccatcaccagtactgggcccagcctctttgcgtcaatagcaactgctccaacctcatctgccaccactggactctccctctgtacccctgtgaccacagcgggcgcccccactgctgggacacagggcttcagcttaaaggcacctggagcagcttccggcacctccacaacaacatccaccgctgccaccgccaccgccaccaccaccagcagcagcagcaccaccggctttgccttgaatttaaaaccactggcgccagccgggatccccagcaatacagcagctgccgtgaccgctccacctggccctggcgcagctgcaggggcggctgccagctccgccatgacctacgcgcagctggagagcctgatcaacaaatggagcctggagctagaggaccaggagcggcacttcctccagcaggccacccaggtcaacgcctgggaccgcacgctgatcgagaatggagaaaagatcaccagcctgcacccgcgaggtggagaaggtgaagctggaccaaaagaagctggaccaggagctcgacttcatcctgtcccagcaaaaagagctggaagaactgctgagccactggaaggattggtccggaaccaaagcgggaccttcacctgcagcacgcggatgaggaacgtgaaaaacctacaagctggctgaaacatcgacgcacactcaacgcagggcccagtactcaagaaacatcaacaactgaaacggtcggggcccccgccaaacagggacccctggaaaaaactgaaaaacctcatgggccatggacccctgcagggaacaacaaaatccccctcttaaaaaaaaggaagaagtaccaggggtggaaggcccccaagaaaaaaaanaaattcctatacatttttagaaaaaaaacctgggccccnnttctatnaatttatagaaaacccccctntttaanttnnnnnnnaaaaaa

SEQ ID NO: 395 - DNA, 1214 bp, human
  misc_feature (8)..(9): n is a, c, g, or t
  misc_feature (811)..(811): n is a, c, g, or t
cccacccnncctgagagatactagagaggatcgcatcaccatcaccatcacggtcgacccacgcgtccgggggagccggctggcacagacccagggctggacgacctggatgtggccctgagcaacctggaggtgaagctggaggggtcggcgcccacagatgtgctggacagcctcaccaccatcccagagctcaaggaccatctccgaatctttcggccccggaagctgaccctgaagggctaccgccaacactgggtggtgttcaaggagaccacactgtcctactacaagagccaggacgaggcccctggggaccccattcagcagctcaacctcaagggctgtgaggtggttcccgatgttaacgtctccggccagaagttctgcattaaactcctagtgccctcccctgagggcatgagtgagatctacctgcggtgccaggatgagcagcagtatgcccgctggatggctggctgccgcctggcctccaaaggccgcaccatggccgacagcagctacaccagcgaggtgcaggccatcctggccttcctcagcctgcagcgcacgggcagtgggggcccgggcaaccacccccacggccctgatgcctctgccgagggcctcaacccctacggcctcgttgccccccgtttccagcgaaagttcaaggccaagcagctcaccccacggatcctggaagcccaccagaatgtggcccagttgtcgctggcagaggcccagctgcgcttcatccaggcctggcagtccctgcccgacttcggcatctcctatgtcatggtcaggntcaagggcagcaggaaagacgagatcctgggcatcgccaacaaccgactgatccgcatcgacttggccgcgggcgacgtggtcaaaacctggcgtttcagcaaaatgggccaatggaatgtcaactgggaaatcccacaggtggacattcaaatttaatgaaaactcccatgcgtcctcccctagcatcaccggcccctcgcccaatgtaacacaactatttcccgcgctaaatatctccttccactcccaccacacaccccccgttgattagctcaacaaactaactcttcaaaagataaccaatccccaccacatactccgacttccttcatttacaacctccacctcacatcacttctccacctcaccccctacaatatccttcaaacgtctctaccact

SEQ ID NO: 396 - DNA, 931 bp, human
tgagaggtcgcatcaccatcaccatcacggatcctatttaggtgacactatagaatcgtcgacccacgcgtccgggggtcctggggcccggcgcgggtggccgccgcggcccctcgggctgcgtggggagggggcttccgcccctgttgtcattgctcctgcagccttttcgctgggactgcgcgacaccgccccccgaccgggtgcccgctgtgtgccaggccgggtgctgggcacggtcccgcgagtgccctataaggactgccaggcaataatgaaggttcttttactgaaggatgcgaaggaagatgactgtggccaggatccgtatatcagggaattaggattatatggacttgaagccactttgatccctgttttatcgtttgagtttttgtctcttcccagtttctctgagaagctttctcatcctgaagattacgggggactcatttttaccagccccagagcagtggaagcagcagagttatgtttggagcaaaacaataaaactgaagtctgggaaaggtctctgaaagaaaaatggaatgccaagtcagtgtatgtggttggaaatgctactgcttctctagtgagtaaaattggcctggatacagaaggagaaacctgtggaaatgcagaaaagcttgcagaatatatttgttccagggagtcctcagcactgcctcttctatttccctgtggaaacctcaaaagagaaatcctgccaaaagcgctcaaggacaaagggattgccatggaaagcataactgtgtatcagacagttgcacacccaggaatccaagggaacctgaacagctactattcccagcagggggttccagccagcatcacattttttagtccctctggcctcacatacagtctcaagcacattcaggagttatctggtgacaatatcgatcaaatt

SEQ ID NO: 397 - DNA, 995 bp, human
atgagaggatcgcatcaccatcaccatcacggatcctatttaggtgacactatagaatcgtcgacccacgcgtccgaaaagctgaaagatgatagcaagttttcagaggctatcacagtgctgctttcctggattgaacgaggggaagtgaatcggcgctctgcaaaccagttctattccatggtgcagtcggccaacagccacgtccgccggctaatgaatgaaaaagccacccatgagcaagagatggaggaagccaaggagaattttaaaaatgccttaactgggattctcactcaatttgagcagattgtggccgttttcaacgcttctaccagacaaaaagcttgggaccatttctcgaaagcccagcgcaagaacatagacatttggcgaaagcattctgaggagctccggaatgctcaaagtgagcagctcatgggcatccgccgcgaagaagaaatggaaatgtctgatgatgagaactgtgacagccctacaaagaaaatgagagtcgatgaatcagccctggctgcccaggcctacgctctgaaagaggagaatgacagtctccgctggcagctggatgcctacaggaatgaggtggagctgctgaaacaagaaaaagaacagcttttccgaacagaagaaaacctcaccaaggaccagcaactgcagtttctgcagcaaaccatgcaaggcatgcagcagcaattgctaaccatccaggaggagttaaacaacaaaaagtcagaattggaacaagcaaaggaagagcagtcccatacacaagcgttactaaaagtcctgcaggaacaattaaaaggtaccaaggaattggtcgagaccaatggccacagccatgaggattcaaatgaaatcaatgtgttgacagttgcattagtcaaccaagaccgagagaacaatattgagaaagaagccaaggcttaaaatcagagaaagaagctctgctaataggtatcatatcaacgttt

SEQ ID NO: 398 - DNA, 912 bp, human
catcaccatcaccatcacggatcctatttaggtgacactatagaatcgtcgacccacgcgtccgggaaagcccactctcccttttaccaggaaggcgtcagcaacgccctgctcaagatggctgagctggggctgacgcgggcggccgacgttctcttgcggcatggggccaatctcaactttgaagacccagtcacctactacacggccttgcacatcgccgtcctgcggaaccagccggacatggtggagctgctggtgcatcacggggccgacgttaatcggagggaccggatccacgagagtagccccttggacctggccagcgaggagcctgagcgcctgccctgcctgcagcgcctcctggaccttggagctgatgtcaatgccgctgacaagcatggaaaaactgctctgctccatgctctggccagcagcgacggggtgcagatccacaatactgagaacattcgtctcttactggaaggaggggcagacgtcaaggccaccaccaaagatggggacacagtgttcacctgcatcatcttcctgcttggtgagaccgtgggaggggacaaagaggaggcccagatgatcaaccgcttctgcttccaagtcacacggctgctgctggcacacggggccgaccccagcgagtgcccagcccacgagtccctcacccacatctgcctgaagagctttaaactgcacttccctctcctgcgcttcctcctggagtccggagccgcctacaactgctccctgcacggtgcgtcctgctggtctggctttcacatcatctttgagaggctctgttcccacccaggctgcacggaagacgagagccatgcggacctcctgcgcaaagctgagactgtcctgatctcatggtgaccaactctcagaaactcc

SEQ ID NO: 399 - DNA, 906 bp, human
catcaccatcaccatcacggatcctatttaggtgacactatagaatcgtcgacccacgcgtccgcggagaaagtgaaaggtgaggcacggccctgcagattttccagcggatcccccggtggcctcatgtcgcgcagtggaaccgatcctcagcaacgccagcaggcgtcagaggcggacgccgcagcagcaaccttccgggcaaacgaccatcagcatatccgctacaacccgctgcaggatgagtgggtgctggtgtcagctcaccgcatgaagcggccctggcagggtcaagtggagccccagcttctgaagacagtgccccgccatgaccctctcaaccctctgtgtcctggggccatccgagccaacggagagatctttgaaaacaaaggtgccatgatgggctgttctaacccccacccccactgccaggtatgggccagcagtttcctgccagatattgcccagcgtgaggagcgatctcagcaggcctataagagtcagcatggagagcccctgctaatggagtacagccgccaggagctactcaggaaggaacgtctggtcctaaccagtgagcactggttagtactggtccccttctgggcaacatggccctaccagacactgctgctgccccgtcggcatgtgcggcggctacctgagctgacccctgctgagcgtgatgatctagcctccatcatgaagaagctcttgaccaagtatgacaacctctttgagacgtcctttccctactccatgggctggcatggggctcccacaggatcagaggctggggccaactggaaaccattggcagctgcacgctcattactaccctccgctcctgcgctctgccactgtccggaaattcatggttggctacgaaatgcttgctcaggc

SEQ ID NO: 400 - DNA, 948 bp, human
agaggatcgcatcaccatcaccatcacggatcctatttaggtgacactatagaatcgtcgacccacgcgtccggatggccgtgcagagggaccttgcgccggggtgcctgggcacagtgccctggcaggggggctcctctcctgtctcctcaggtccagatcaaggaagagacccgcttggtgtctgtcattgaccagattgacaaggctgtggccatcatcccccgaggcgccctcttcaagaccccttttggacccacccatgtcaatcggacctttgaaggactgtccttgtctgaggccaagaagctcagctcctacttccatttcagggagcctgttgagctaaagaataagaccttgcttgagaaggctgacctggacccctccctggatttcatggactccttggagcatgacattcccaaagggtcctggagcatccagatggagaggggcaatgccctggtggtgctgcgcagcctgctctggccgggcctcaccttctaccatgctccccgcaccaagaactatggctacgtctacgtgggcactggcgagaagaacatggacttgcccttcatgctatagaatgggagccagcctggatgtttttaaacagagtctaaacatgattttcttaagcttcagtgaacttggcctgcctgttctgtcctatcttcttaactccacctccgtctggttccagattctgaaaggcccactgagccagggagctcatttctaaaccaagtggcagaggggttggaatgtgctaatgaaagagattctagacaacgatgggtggaaatggctgtgggagaaggtgacaaccagggcccctttgaggaacgcagtttcttggattcacacgagagcggcaagtgtgtcaggcagcccaccttggctccctgcagctctcccacagtaaggagctcacagctgtca

SEQ ID NO: 401 - DNA, 1396 bp, human
  misc_feature (1)..(1): n is a, c, g, or t
  misc_feature (962)..(962): n is a, c, g, or t
  misc_feature (993)..(993): n is a, c, g, or t
ngcctccctcgcttgagaattactagagaggatcgcatcaccatcaccatcacggtcgacccacgcgtccgctccactccgtcccccgcgggtctgctctgtgtgccatggacggcattgtcccagatatagccgttggtacaaagcggggatctgacgagcttttctctacttgtgtcactaacggaccgtttatcatgagcagcaactcggcttctgcagcaaacggaaatgacagcaagaagttcaaaggtgacagccgaagtgcaggcgtcccctctagagtgatccacatccggaagctccccatcgacgtcacggagggggaagtcatctccctggggctgccctttgggaaggtcaccaacctcctgatgctgaaggggaaaaaccaggccttcatcgagatgaacacggaggaggctgccaataccatggtgaactactacacctcggtgacccctgtgctgcgcggccagcccatctacatccagttctccaaccacaaggagctgaagaccgacagctctcccaaccaggcgcgggcccaggcggccctgcaggcggtgaactcggtccagtcggggaacctggccttggctgcctcggcggcggccgtggatgcagggatggcgatggccgggcagagccccgtgctcaggatcatcgtggagaacctcttctaccctgtgaccctggatgtgctgcaccagattttctccaagttcggcacagtgttgaagatcatcaccttcaccaagaacaaccagttccaggccctgctgcagtatgcggaccccgtgagcgcccagcacgccaagctgtcgctggacgggcagaacatctacaacgcctgctgcacgctgcgcatcgacttttccaagctcaccagcctcaacgtcaagtacaacaatgacaagagccgtgactacacacgcccagacctggccttccgggacagncagccctcgctggaccagacatggccgcggncctcggtgcacctgggaaatcccagcctcccgtaggcaggagctgtttcccctcccaccttgcattctcagctgcagcctttcccttccaacgtcacggggcctggccccctgcatccccccgggggggggaactcggcgaaagtccaatcccatcccgcctggggagggagaaaccgtattttggcacaccctccccaagagtcacccaacctcctttttccgcccatgacagcacccaagaaccccttctaaaaaaaccttatcacgcgaccaactaccctacacgacctaaggccttttccaagaccttctccccacacaaagtcttccgaccaatcccgccgaccctcctctctctttacccaacaacaccctctccaacaaaccccacaatactccac

SEQ ID NO: 402 - DNA, 920 bp, human
tatgagaggatcgcatcaccatcaccatcacggatcctatttaggtgacactatagaatcgtcgacccacgcgtccggggagtgcggggcgcgcggtgacagcgcggggttggcggcgtgggacccagggggcgacagaggcagcagcagcccgaggcctgaggagaggggaccggcggcggcggcaatgctggagacccttcgcgagcggctgctgagcgtgcagcaggatttcacctccgggctgaagactttaagtgacaagtcaagagaagcaaaagtgaaaagcaaacccaggactgttccatttttgccaaagtactctgctggattagaattacttagcaggtatgaggatacatgggctgcacttcacagaagagccaaagactgtgcaagtgctggagagctggtggatagcgaggtggtcatgctttctgcgcactgggagaagaaaaagacaagcctcgtggagctgcaagagcagctccagcagctcccagctttaatcgcagacttagaatccatgacagcaaatctgactcatttagaggcgagttttgaggaggtagagaacaacctgctgcatctggaagacttatgtgggcagtgtgaattagaaagatgcaaacatatgcagtcccagcaactggagaattacaagaaaaataagaggaaggaacttgaaaccttcaaagctgaactagatgcagagcacgcccagaaggtcctggaaatggagcacacccagcaaatgaagctgaaggagcggcagaagttttttgaggaagccttccagcaggacatggagcagtacctgtccactggctacctgcagattgcagagcggcgagagcccataggcagcatgtcatccatggaagtgaacgtggacatgctggagcagatggacctgatgg

SEQ ID NO: 403 - DNA, 871 bp, human
tgagaggatcgcatcaccatcaccatcacggatcctatttaggtgacactatagaatcgtcgacccacgcgtccgcccacgcgtccgcccacgcgtccgcccacgcgtccggctgcagctcgggacttcggcctgacccagcccccatggcttcagaagagctacagaaagatctagaagaggtaaaggtgttgctggaaaaggctactaggaaaagagtacgtgatgcccttacagctgaaaaatccaagattgagacagaaatcaagaacaagatgcaacagaaatcacagaagaaagcagaacttcttgataatgaaaaaccagctgctgtggttgctcccattacaacgggctatacggtgaaaatcagtaattatggatgggatcagtcagataagtttgtgaaaatctacattaccttaactggagttcatcaagttcccactgagaatgtgcaggtgcatttcacagagaggtcatttgatcttttggtaaagaatctaaatgggaagagttactccatgattgtgaacaatctcttgaaacccatctctgtggaaggcagttcaaaaaaagtcaagactgatacagttcttatattgtgtagaaagaaagtggaaaacacaaggtgggattacctgacccaggttgaaaaggagtgcaaagaaaaagagaagccctcctatgacactgaaacagatcctagtgagggattgatgaatgttctaaagaaaatttatgaagatggagacgatgatatgaagcgaaccattaataaagcctgggtggaatcaagagagaagcaagccaaaggagacacggaattttgagactttaaagtcgttttgggaactgtgatgtgatgtgg

SEQ ID NO: 404 - DNA, 992 bp, human
tgagaggatcgcatcaccatcaccatcacggatcctatttaggtgacactatagaatcgtcgacccacgcgtccgtctacaccgaggtccgcgagctggtgagcctcaagcaggagcagcaggctttcaaggaggcggccgacacggagcggctcgccctgcaggccctcacggagaagcttctcaggtctgaggagtccgtctcccgcctcccggaggagatccggagactggaggaagagctccgccagctgaagtccgattcccacgggccgaaggaggacggaggcttcagacactcggaagcctttgaggcactccagcaaaagagtcagggactggactccaggctccagcacgtggaggatggggtgctctccatgcaggtggcttctgcgcgccagaccgagagcctggagtccctcctgtccaagagccaggagcacgagcagcgcctggccgccctgcaggggcgcctggaaggcctcgggtcctcagaggcagaccaggatggcctggccagcacggtgaggagcctgggcgagacccagctggtgctctacggtgacgtggaggagctgaagaggagtgtgggcgagctccccagcaccgtggaatcactccagaaggtgcaggagcaggtgcacacgctgctcagtcaggaccaagcccaggccgcccgtctgcctcctcaggacttcctggacagactttcttctctagacaacctgaaagcctcagtcagccaagtggaggcggacttgaaaatgctcaggactgctgtggacagtttggttgcatactcggtcaaaatagaaaccaacgagaacaatctggaatcagccaagggtttactagatgacctgaggaatgatctggataggttgtttgtgaaagtggagaagattcacgaaaaggtctaaatgaattgcgtgtgcagggcgcggatttaaagtccaatttctcatgaccaaaaatgtgtggtttttccc

SEQ ID NO: 405 - DNA, 395 bp, human
tgagaggatcgcatcaccatcaccatcacggatcctatttaggtgacactatagaatcgtcgacccacgcgtccgcgtcgctcaaatgtagcaccgtcgtctgcgtgatctgcttggagaagcccaaataccgctgtccagcctgccgcgtgccctactgctcggtagtctgcttccggaagcacaaagaacagtgcaaccctgaaactcgtcctgttgagaaaaaaataagatcagctcttcctaccaaaaccgtaaagcctgtggaaaacaaagatgatgatgactctatagctgattttctcaatagtgatgaggaagaagacagagtttctttgcagaatttaaagaatttaggggaatctgcatcattaagaagcttattgctcaatcca

SEQ ID NO: 406 - DNA, 1111 bp, human
  misc_feature (1)..(1): n is a, c, g, or t
  misc_feature (872)..(872): n is a, c, g, or t
  misc_feature (880)..(880): n is a, c, g, or t
  misc_feature (886)..(886): n is a, c, g, or t
  misc_feature (897)..(897): n is a, c, g, or t
  misc_feature (922)..(922): n is a, c, g, or t
  misc_feature (967)..(967): n is a, c, g, or t
  misc_feature (998)..(998): n is a, c, g, or t
  misc_feature (1000)..(1000): n is a, c, g, or t
  misc_feature (1009)..(1009): n is a, c, g, or t
  misc_feature (1018)..(1018): n is a, c, g, or t
  misc_feature (1028)..(1028): n is a, c, g, or t
  misc_feature (1030)..(1032): n is a, c, g, or t
  misc_feature (1034)..(1034): n is a, c, g, or t
  misc_feature (1038)..(1038): n is a, c, g, or t
  misc_feature (1052)..(1052): n is a, c, g, or t
  misc_feature (1072)..(1072): n is a, c, g, or t
  misc_feature (1074)..(1075): n is a, c, g, or t
  misc_feature (1082)..(1082): n is a, c, g, or t
  misc_feature (1086)..(1086): n is a, c, g, or t
  misc_feature (1093)..(1093): n is a, c, g, or t
  misc_feature (1100)..(1100): n is a, c, g, or t
  misc_feature (1106)..(1106): n is a, c, g, or t
ntagagaaattactatgagaggatcgcatcaccatcaccatcacggatcctatttaggtgacactatagaatcgtcgacccacgcgtccgcccacgcgtccgccttagccgacagcgagaaactgcctattcagaaacacagaaacaccgagacctcaaaatcccctgagaaggacgttcccatggtagaaaagaagagcaagaaacccaagaagaaagagaaaaaacacaaagagaaagagagagacaaggagaagaagaaggagaaggagaagaaggctgaggacctggacttctggctgtctaccaccccaccgcctgcccccgcccccgcccccgcccccgttccatccacggacgagtgtgaggacgccaagacggaggcgcagggcgaggaggacgatgccgaggggcaagaccaggacaagaaatctcccaagcctaagaagaagaagcacaggaaggagaaggaggagcggaccaaaggcaagaagaagtccaagaagcagcctccaggcagcgaggaggcagcgggggagccggtgcagaatggcgcgccagaggaggagcagctcccgcctgagtccagctactccctcctcgctgaaaattcctatgttaaaatgacctgtgacatccggggcagtctgcaggaggacagccaggtcactgtggccatcgtgctggagaacaggagcagcagcatcctcaagggcatggagctcagcgtgctggactcactcaatgccaggatggcccggccgcagggctcctccgtccacgatggcgtccccgtgcctttccagctgcccccaggcgtctccaacgaagcccagtatgtgttcaccatccagagcatcgtcatggcgcanaagctcanggggancctgtccttcnttgccaagaatgacgagggtgcganccacgagaagctggacttcaggctgcactttcagctgcagcttcntacttgatcaccactccctgctacagtgacncntttgctaanttgctggantctgggggantnnncntgancttcattcaagtcnatggctttcggatgttcttncnnatttttntggngaaaatntgttttncccccnttttt

SEQ ID NO: 407 - DNA, 875 bp, human
  misc_feature (712)..(712): n is a, c, g, or t
  misc_feature (745)..(745): n is a, c, g, or t
  misc_feature (849)..(849): n is a, c, g, or t
  misc_feature (859)..(859): n is a, c, g, or t
  misc_feature (864)..(867): n is a, c, g, or t
  misc_feature (869)..(875): n is a, c, g, or t
tagagagatactatgagaggtcgcatcaccatcaccatcacggatcctatttaggtgacactatagaatcgtcgactctggaccttggctgtcactcagttgaccggcccgcacccgaggatctgacggtggtgctcggccaggaacgccgtaaccacagctgtgagccctgccagacgttggccgtgcgctcctaccgcttgcacgaggccttctcgcccgtcagctaccagcacgacctggctctgttgcgccttcaggaggatgcggacggcagctgcgcgctcctgtcgccttacgttcagccggtgtgcctgccaagcggcgccgcgcgaccctccgagaccacgctctgccaggtggccggctggggccaccagttcgagggggcggaggaatatgccagcttcctacaggaggcgcaggtaccgttcctctccctggagcgctgctcagccccggacgtgcacggatcctccatcctccccgacatgctctgcgcagggttcctcgagggcggcaccgatgcgtgccagggtgattccggaggcccgctggtgtgtgaggaccaagctgcagagcgccggctcaccctgcaaggcatcatcagctggggatcgggctgtggtgaccgcaacaagccaggcgtctacaccgatgtggcctactacctggcctggatccgggagcacaccgtttcctgattgctcanggactcatctttccctccttggtgattccgcantgagagagtggctggggcatggaaggcaagaatgtgtcccattccccagtgccgccagctccgcgccaggatggcgcaggactcattaagtgctttgaaatgcnaaaaaaaaanaaaannnnannnnnnn

SEQ ID NO: 408 - DNA, 1173 bp, human
  misc_feature (835)..(835): n is a, c, g, or t
  misc_feature (837)..(837): n is a, c, g, or t
  misc_feature (877)..(877): n is a, c, g, or t
  misc_feature (881)..(881): n is a, c, g, or t
  misc_feature (916)..(916): n is a, c, g, or t
  misc_feature (923)..(923): n is a, c, g, or t
  misc_feature (954)..(955): n is a, c, g, or t
  misc_feature (984)..(984): n is a, c, g, or t
  misc_feature (993)..(993): n is a, c, g, or t
  misc_feature (1009)..(1009): n is a, c, g, or t
  misc_feature (1014)..(1014): n is a, c, g, or t
  misc_feature (1016)..(1017): n is a, c, g, or t
  misc_feature (1023)..(1023): n is a, c, g, or t
  misc_feature (1027)..(1027): n is a, c, g, or t
  misc_feature (1033)..(1033): n is a, c, g, or t
  misc_feature (1040)..(1040): n is a, c, g, or t
  misc_feature (1042)..(1042): n is a, c, g, or t
  misc_feature (1051)..(1051): n is a, c, g, or t
  misc_feature (1057)..(1057): n is a, c, g, or t
  misc_feature (1060)..(1060): n is a, c, g, or t
  misc_feature (1066)..(1066): n is a, c, g, or t
  misc_feature (1069)..(1069): n is a, c, g, or t
  misc_feature (1072)..(1072): n is a, c, g, or t
  misc_feature (1093)..(1093): n is a, c, g, or t
  misc_feature (1096)..(1096): n is a, c, g, or t
  misc_feature (1107)..(1107): n is a, c, g, or t
  misc_feature (1114)..(1114): n is a, c, g, or t
  misc_feature (1124)..(1124): n is a, c, g, or t
  misc_feature (1129)..(1129): n is a, c, g, or t
  misc_feature (1131)..(1131): n is a, c, g, or t
  misc_feature (1136)..(1136): n is a, c, g, or t
  misc_feature (1139)..(1139): n is a, c, g, or t
  misc_feature (1143)..(1143): n is a, c, g, or t
  misc_feature (1146)..(1147): n is a, c, g, or t
  misc_feature (1158)..(1158): n is a, c, g, or t
tagagaaattactatgagaggatcgcatcaccatcaccatcacggatcctatttaggtgacactatagaatcgtcgacccacgcgtccggtaagagcctctgctgccggaacctggccgtggagaaagccgtgagcgagctgccttcagagtgtggcttctgcctgcgccagtttccccgctccctcctggagaggcaccagaaagaggaatgccaggacagggtaacccagtgcaagtacaaacgcatcggctgcccatggcacggccccttccatgagctgacggtgcacgaggctgcgtgcgcccacccgaccaagacaggcagtgagctgatggagatcctggatgggatggaccagagccaccgcaaggagatgcagctgtacaacagcatcttcagcctgctcagcttcgagaagattggctacacaggtgaggcgccccgccgcctgctgcatgccacacaggtgtgggttggggggctggcagccaggagtctgggggcagcaggctctgggcactgggcactgacagcgccggacagccgggctctggacaagctcccggtggacaggtggacacctcggtcgagaagacaggccggagactgagtggaaggaggggccgaggcagaccccaggtgcacacctgtgtggctctcacagcagccccgcccacctgtcctcgccaccctggcttcaccacccctgcaaggtggcatctcactgtggggctccagagcctcaagacagtcagggtctaaccagaaaagtgggcaggtctcagggggcctgggagctaggggcctgcccctcggaccctggggcaagaanancaccctgccgagtgaggtcctacctgcaggcagtcactgncccnggccatgggcctctcaggctggcacgaagccattncaggganagggctccacaacaagctgaaggtgcccganncaaactgtaaaaccgggagtgaaaccccnaaaaccccnaggctggatgcttgcncaggnannctgganttcntggctntctgggncnctgccaccncctttnaangtgtcnggnaanagaaccaggccaaaacctggnccnaaaagaaaacnaaaaacnctttttaatntgggncnattgnaanaaantcnntcctttatttntaaccaaaaaagggg

SEQ ID NO: 409 - DNA, 1216 bp, human
  misc_feature (808)..(808): n is a, c, g, or t
  misc_feature (847)..(847): n is a, c, g, or t
  misc_feature (850)..(850): n is a, c, g, or t
  misc_feature (909)..(909): n is a, c, g, or t
  misc_feature (921)..(921): n is a, c, g, or t
  misc_feature (936)..(936): n is a, c, g, or t
  misc_feature (963)..(963): n is a, c, g, or t
  misc_feature (965)..(965): n is a, c, g, or t
  misc_feature (983)..(983): n is a, c, g, or t
  misc_feature (990)..(990): n is a, c, g, or t
  misc_feature (993)..(993): n is a, c, g, or t
  misc_feature (998)..(998): n is a, c, g, or t
  misc_feature (1005)..(1005): n is a, c, g, or t
  misc_feature (1011)..(1011): n is a, c, g, or t
  misc_feature (1015)..(1015): n is a, c, g, or t
  misc_feature (1018)..(1018): n is a, c, g, or t
  misc_feature (1024)..(1025): n is a, c, g, or t
  misc_feature (1029)..(1029): n is a, c, g, or t
  misc_feature (1032)..(1032): n is a, c, g, or t
  misc_feature (1040)..(1040): n is a, c, g, or t
  misc_feature (1051)..(1051): n is a, c, g, or t
  misc_feature (1057)..(1057): n is a, c, g, or t
  misc_feature (1059)..(1059): n is a, c, g, or t
  misc_feature (1076)..(1076): n is a, c, g, or t
  misc_feature (1078)..(1078): n is a, c, g, or t
  misc_feature (1106)..(1106): n is a, c, g, or t
  misc_feature (1119)..(1119): n is a, c, g, or t
  misc_feature (1127)..(1127): n is a, c, g, or t
  misc_feature (1129)..(1130): n is a, c, g, or t
  misc_feature (1135)..(1135): n is a, c, g, or t
  misc_feature (1148)..(1148): n is a, c, g, or t
  misc_feature (1160)..(1160): n is a, c, g, or t
  misc_feature (1164)..(1164): n is a, c, g, or t
  misc_feature (1186)..(1186): n is a, c, g, or t
  misc_feature (1191)..(1192): n is a, c, g, or t
  misc_feature (1202)..(1202): n is a, c, g, or t
  misc_feature (1210)..(1210): n is a, c, g, or t
  misc_feature (1214)..(1214): n is a, c, g, or t
  misc_feature (1216)..(1216): n is a, c, g, or t
atagagaaattactatgagaggatcgcatcaccatcaccatcacggatcctatttaggtgacactatagaatcgtcgacccacgcgtccgccatgtccttgaagcttcaggcaagcaatgtaaccaacaagaatgaccccaagtccatcaactctcgagtcttcattggaaacctcaacacagctctggtgaagaaatcagatgtggagaccatcttctctaagtatggccgtgtggccggctgttctgtgcacaagggctatgcctttgttcagtactccaatgagcgccatgcccgggcagctgtgctgggagagaatgggcgggtgctggccgggcagaccctggacatcaacatggctggagagcctaagcctgacagacccaaggggctaaagagagcagcatctgccatatacagtggctacatctttgactatgattactaccgggacgacttctacgacaggctcttcgactaccggggccgtctgtcgcccgtgccagtgcccagggcggtccctgtgaagcgaccccgggtcacagtccctttggtccggcgtgtcaaaactaacgtacctgtcaagctctttgcccgctccacagctgtcaccaccagctcagccaagatcaagttaaagagcagtgagctgcaggccatcaagacggagctgacacagatcaagtccaatatcgatgccctgctgagccgcttggagcagatcgctgcggagcaaaaggccaatccagatggcaagaagaagggtgatggaggtggcgccggcggcggcggcggtggtggtggcancggtggcggtggcagtggtggtggcggtggcggtggcancanccggccaccagccccccaagagaacacaacttctgaggcaggcctgccccagggggaancacggacccganacgacggcgatgagnaaaggctcctgacacacagcgaggaananctggaacacagccagganacaaacncgnatganggggccnttgcantaancancctgannggancantggccacnaccaggtgaanggcatngnttgccccaggcctcaancngggcaccaaccctggatgccccccccancgggtaccaaaanaaactggnannagggncctcctccccaangaatccaaccanggcnatgttctttgcaggggaattangggcnnattcttcccnagaacccncctntn

SEQ ID NO: 410 - DNA, 1062 bp, human
  misc_feature (1)..(1): n is a, c, g, or t
  misc_feature (199)..(199): n is a, c, g, or t
  misc_feature (525)..(525): n is a, c, g, or t
  misc_feature (536)..(536): n is a, c, g, or t
  misc_feature (560)..(560): n is a, c, g, or t
  misc_feature (744)..(744): n is a, c, g, or t
  misc_feature (819)..(819): n is a, c, g, or t
  misc_feature (831)..(831): n is a, c, g, or t
  misc_feature (844)..(844): n is a, c, g, or t
  misc_feature (851)..(851): n is a, c, g, or t
  misc_feature (873)..(873): n is a, c, g, or t
  misc_feature (882)..(882): n is a, c, g, or t
  misc_feature (887)..(887): n is a, c, g, or t
  misc_feature (914)..(914): n is a, c, g, or t
  misc_feature (918)..(918): n is a, c, g, or t
  misc_feature (920)..(920): n is a, c, g, or t
  misc_feature (947)..(947): n is a, c, g, or t
  misc_feature (952)..(952): n is a, c, g, or t
  misc_feature (966)..(966): n is a, c, g, or t
  misc_feature (968)..(968): n is a, c, g, or t
  misc_feature (973)..(973): n is a, c, g, or t
  misc_feature (978)..(978): n is a, c, g, or t
  misc_feature (982)..(982): n is a, c, g, or t
  misc_feature (990)..(990): n is a, c, g, or t
  misc_feature (1004)..(1004): n is a, c, g, or t
  misc_feature (1030)..(1030): n is a, c, g, or t
  misc_feature (1032)..(1032): n is a, c, g, or t
  misc_feature (1034)..(1034): n is a, c, g, or t
  misc_feature (1041)..(1041): n is a, c, g, or t
  misc_feature (1046)..(1046): n is a, c, g, or t
  misc_feature (1050)..(1050): n is a, c, g, or t
  misc_feature (1052)..(1052): n is a, c, g, or t
  misc_feature (1055)..(1056): n is a, c, g, or t
  misc_feature (1058)..(1059): n is a, c, g, or t
naaattagaggaaaattacttatgagaggatcgcatcaccatcaccattcacgggatcctatttaggtgacactatagaatcgtcgacccacgcgtccgcccacgcgtccggtggaagtgaggagagaggagaggagaaggggaccagctctccggactatcggcactaccttcgaatgtgggccaaggagaaagaggntcagaaggagacgattaaggatcttcccaagatgaaccagaagcagttcattgagctgtgcaagacgctttacaacatgttcagtgaagaccccatggagcaggacctgtaccacgccatcgccaccgtggccagcctcctgctccgcatcggagaggtggggaagaagttctcagcccgcacaggcaggaagcccagggactgtgccactgaggaggacgagccaccagcacccgaactgcatcaggacgcagccagggagcttcagcccccagctgcaggagacccccaagccaaagcaggcggagacacacacctcggaaaanccccacagganagccaggtggtggtggaggggggnagcggcgagggacagggctcaccctcccagctgctgtctgacgatgaaaccaaagacgacatgtccatgtcctcctactcggtggtcagcacgggctccctgcaatgtgaagaccttgcagacgacacggtgctggtgggcggggaggcctgcagccccacagcgcgcatcggcggcaccgtcnacaccgactggtgcatctcctttgagcagatcctggcctccatcctgacggagtccgtgctggtgaacttctttnaaaagagagtgnacattggactcangatccanggaccaaaacgaaaggggaganacagttcancaccnccaggtgaaccatgaagcagcctggantttncnggctgatgcctgcaagctgtgaggccntggcncaaggtgtcatcantnggggntgggncctncatcttcntcctgccttttccntcctttataggtttttctttaaaggngngncccttcntgttntccnanaannanngaa

SEQ ID NO: 411 - DNA, 835 bp, human
  misc_feature (691)..(691): n is a, c, g, or t
  misc_feature (817)..(817): n is a, c, g, or t
gagatactatgagaggtcgcatcccatcaccatcacggatcctatttaggtgacactatagaatcgtcgactctggaccttggctgtcactcagttaagccatcagtacccagtgctgacagtgagacacccctgacccaggacaggccaggcagtcccagtggctctgaggacaagggcaacccggcgccggagctgagggcctcctttctgccacgtaccttgtctctgcggaactccatcagcaggatcatgtcggaggcggacagtgggaccctggaggacgagtggcaggccatctcggagattgcctctacttgcaacaccattctggagtcgctgtcccgagagggacagcccatcccagagagtggagaccctaagggaactccaaaatctgatgctgagccagagcctgggaacctctcagagaaggtctctcacttggagtccatgctcaggaagctgcaggaggacctgcagaaggagaaggcggacagggcggccctggaggaggaggtgcggagcctgagacacaacaaccggcggctgcaggcggagtctgagagtgcagccacacgcctcctcctggcctccaagcagctgggctcacccaccgccgacctggcctgagccgtctggaaccacctgggcccctgagggcactgtggtcacactgggccctcctcangaactctccctgcgcagaggcgtgtcttagcactgcccccctccctagcccctttattggtgggcgaagtggcctccacccctttcctgtttgtaaatattctgtggagaaaaagagacttcaggnagtaaaaaagcactgatg

SEQ ID NO: 412 - DNA, 1173 bp, human
  misc_feature (283)..(283): n is a, c, g, or t
  misc_feature (778)..(778): n is a, c, g, or t
  misc_feature (882)..(882): n is a, c, g, or t
  misc_feature (905)..(905): n is a, c, g, or t
  misc_feature (908)..(908): n is a, c, g, or t
  misc_feature (936)..(936): n is a, c, g, or t
  misc_feature (942)..(942): n is a, c, g, or t
  misc_feature (946)..(946): n is a, c, g, or t
  misc_feature (949)..(949): n is a, c, g, or t
  misc_feature (972)..(972): n is a, c, g, or t
  misc_feature (986)..(986): n is a, c, g, or t
  misc_feature (1000)..(1000): n is a, c, g, or t
  misc_feature (1004)..(1004): n is a, c, g, or t
  misc_feature (1009)..(1009): n is a, c, g, or t
  misc_feature (1018)..(1018): n is a, c, g, or t
  misc_feature (1030)..(1030): n is a, c, g, or t
  misc_feature (1048)..(1048): n is a, c, g, or t
  misc_feature (1055)..(1055): n is a, c, g, or t
  misc_feature (1066)..(1066): n is a, c, g, or t
  misc_feature (1068)..(1068): n is a, c, g, or t
  misc_feature (1073)..(1073): n is a, c, g, or t
  misc_feature (1077)..(1078): n is a, c, g, or t
  misc_feature (1087)..(1087): n is a, c, g, or t
  misc_feature (1095)..(1095): n is a, c, g, or t
  misc_feature (1104)..(1104): n is a, c, g, or t
  misc_feature (1106)..(1106): n is a, c, g, or t
  misc_feature (1111)..(1111): n is a, c, g, or t
  misc_feature (1117)..(1117): n is a, c, g, or t
  misc_feature (1120)..(1120): n is a, c, g, or t
  misc_feature (1122)..(1122): n is a, c, g, or t
  misc_feature (1134)..(1134): n is a, c, g, or t
  misc_feature (1139)..(1139): n is a, c, g, or t
  misc_feature (1145)..(1145): n is a, c, g, or t
  misc_feature (1159)..(1160): n is a, c, g, or t
  misc_feature (1164)..(1164): n is a, c, g, or t
  misc_feature (1167)..(1167): n is a, c, g, or t
  misc_feature (1169)..(1169): n is a, c, g, or t
tagagagattactatgagaggatcgcatcaccatcaccatcacggatcctatttaggtgacactatagaatcgtcgacccacgcgtccgcccacgcgtccggctccacggagcacgccctgtgcgggaagccagaccagatcgagggctcgctggcggccttcctgcccgacctgtccctggccaagaggaagacctggcggaacccttggcggcgttcctaccacaagcgcaagaaggccgagtgggaggtggaccctgactactgcgaggaggtgaagcanacaccgccctacgacagcagccaccgcatcctggacgtcatggacatgacgatcttcgacttcctcatgggaaacatggaccgtcaccactacgagacttttgagaagtttgggaatgaaacgttcatcatccacttagacaatggaagagggtttgggaagtattcgcacgacgagctctccatcctggtgccgctacagcagtgctgcaggatccggaagtccacctacctgcgtctgcagctcctggccaaggaggagtacaagctgagcctgctgatggccgagtctctgcggggggaccaggtggcacccgtgctgtaccagccgcacctggaggccctggaccggcggctccgcgtcgttctaaaggccgtccgggactgcgtggagagggacgggctccacagcgtggtggatgacgacctggacactgagcacagagccgcctcggcgaggtagtgtccgccggccgctgcgctgcccgggacaganacagaggggccggacctcccagcaagcgcatgcgcccgtcgtgaattcagtgaattcagaggcaggacgggatcatccggagtcgggagctgctgccacaggangcgaggctccccaggtctcatanganacattttgtcagtgtttgaccaaaaaancttggnaagnaancgctgtctgtgctcacgaaaaangcggccggcgccgnaggcatttcattcntttntgtanggaaaggancctttatttacnatttggatttaatttgangaaaaantatataaaccnanaactntacnnaaatgccantccctacnaaccaaccnangaacnccctcntgntntgggggcccctnaggcnaactcncccccaggtttccnntcgnacnanttaa

SEQ ID NO: 413 - DNA, 938 bp, human
agaggatcgcatcaccatcaccatcacggtcgacccacgcgtccgcgcctgtatgccagcgcaagtgtgcccgcaggcgagaggccatttatgtgtacctggtcatactgtgggaaacgcttcacacgttcggatgagctacagaggcacaaacgtacacacacaggtgagaagaaatttgcctgccctgagtgtcctaagcgcttcatgaggagtgaccacctgtcaaaacatatcaagacccaccagaataagaagggaggcccaggtgtagctctgagtgtgggcactttgcccctggacagtggggcaggttcagaaggcagtggcactgccactccttcagcccttattaccaccaatatggtagccatggaggccatctgtccagagggcattgcccgtcttgccaacagtggcatcaacgtcatgcaggtggcagatctgcagtccattaatatcagtggcaatggcttctgagatcaggcacccggggccagagacatatgggccataccccttaaccccgggatgcaaggtagcatgggtccaagagacatggaagagagagccatgaagcattaaaatgcatggtgttgagaagaatcaggagagggatacaagagaggagatggggtcccggcacccatctgtatcatcagtgcctctttgaaggtgggaaacattagtgaaaattctgttggtgccacgctttgatgagcatttgtttgaccccagtttcttcttacacttcttaccccaaccggccgcgatccgcatgcgagctcgattagctgagcttggactcctgttgatagatccagtaatgacctcagaactccatctggatttgttcagaacgctcggttgccgccgggcgttttttattggtgagaatccaagctagcttggcgagattttcagagctaaagaagcta

SEQ ID NO: 414 - DNA, 1022 bp, human
  misc_feature (835)..(835): n is a, c, g, or t
  misc_feature (837)..(837): n is a, c, g, or t
  misc_feature (842)..(842): n is a, c, g, or t
  misc_feature (863)..(863): n is a, c, g, or t
  misc_feature (870)..(870): n is a, c, g, or t
  misc_feature (873)..(873): n is a, c, g, or t
  misc_feature (877)..(877): n is a, c, g, or t
  misc_feature (879)..(879): n is a, c, g, or t
  misc_feature (920)..(920): n is a, c, g, or t
  misc_feature (929)..(929): n is a, c, g, or t
  misc_feature (942)..(942): n is a, c, g, or t
  misc_feature (965)..(965): n is a, c, g, or t
  misc_feature (972)..(973): n is a, c, g, or t
  misc_feature (976)..(976): n is a, c, g, or t
  misc_feature (980)..(980): n is a, c, g, or t
  misc_feature (996)..(996): n is a, c, g, or t
  misc_feature (1001)..(1001): n is a, c, g, or t
  misc_feature (1007)..(1007): n is a, c, g, or t
  misc_feature (1011)..(1012): n is a, c, g, or t
  misc_feature (1015)..(1017): n is a, c, g, or t
  misc_feature (1020)..(1020): n is a, c, g, or t
ttagagaaattactatgagaggatcgcatcaccatcaccatcacggatcctatttaggtgacactatagaatcgtcgacccacgcgtccgcccagcaacacgctcctgacttcccttcccaaggactcgacctgagaaccgccatgtactcggagatccagagggagcgggcagacattgggggcctgatggcccggccagaatacagagagtggaatccggagctcatcaagcccaagaagctgctgaaccccgtgaaggcctctcggagtcaccaggagctccaccgggagctgctcatgaaccacagaaggggccttggtgtggacagcaagccagagctgcagcgtgtcctagagcaccgccggcggaaccagctcatcaagaagaagaaggaggagctggaagccaagcggctgcagtgcccctttgagcaggagctgctgagacggcagcagaggctgaaccagctggaaaaaccaccagagaaggaagaggatcacgcccccgagtttattaaagtcagggaaaacctgcggagaattgccacactgaccagcgaagagagagagctgtagggccagctgccgggctcaggccactgcccaccctggcctggacagcctccttcagcccttctgtacctggcagccctgggccccaggccctgggacgtctgtgatgttcccacctgcttctgtagaaatgtgtcaccccagagggcctggctctccctgggaggctggggcccctaagctcctaggttttccttccaagcacccagccctcctgctccaagagggataacctgcacccctccctgcaaggggttcanancccancacaggagctttctctggcanaattgangangaanangtggccctctgacttgacaagccttctgttctgcccaggcnttccaccangaatctccgaggntcccagggcccgcttctccgtanaccccanntcntagntctcaaaaactccccncctgnggtttnctgnnccnnnaantt

SEQ ID NO: 415 - DNA, 1251 bp, human
  misc_feature (876)..(876): n is a, c, g, or t
  misc_feature (906)..(906): n is a, c, g, or t
  misc_feature (920)..(921): n is a, c, g, or t
  misc_feature (925)..(925): n is a, c, g, or t
  misc_feature (927)..(927): n is a, c, g, or t
  misc_feature (932)..(932): n is a, c, g, or t
  misc_feature (952)..(952): n is a, c, g, or t
  misc_feature (955)..(955): n is a, c, g, or t
  misc_feature (957)..(957): n is a, c, g, or t
  misc_feature (1013)..(1013): n is a, c, g, or t
  misc_feature (1020)..(1020): n is a, c, g, or t
  misc_feature (1029)..(1029): n is a, c, g, or t
  misc_feature (1032)..(1032): n is a, c, g, or t
  misc_feature (1048)..(1049): n is a, c, g, or t
  misc_feature (1060)..(1060): n is a, c, g, or t
  misc_feature (1068)..(1068): n is a, c, g, or t
  misc_feature (1070)..(1070): n is a, c, g, or t
  misc_feature (1087)..(1087): n is a, c, g, or t
  misc_feature (1096)..(1096): n is a, c, g, or t
  misc_feature (1105)..(1105): n is a, c, g, or t
  misc_feature (1111)..(1111): n is a, c, g, or t
  misc_feature (1124)..(1125): n is a, c, g, or t
  misc_feature (1136)..(1136): n is a, c, g, or t
  misc_feature (1143)..(1143): n is a, c, g, or t
  misc_feature (1147)..(1148): n is a, c, g, or t
  misc_feature (1157)..(1158): n is a, c, g, or t
  misc_feature (1163)..(1163): n is a, c, g, or t
  misc_feature (1170)..(1170): n is a, c, g, or t
  misc_feature (1175)..(1175): n is a, c, g, or t
  misc_feature (1184)..(1184): n is a, c, g, or t
  misc_feature (1190)..(1190): n is a, c, g, or t
  misc_feature (1192)..(1193): n is a, c, g, or t
  misc_feature (1195)..(1195): n is a, c, g, or t
  misc_feature (1223)..(1223): n is a, c, g, or t
  misc_feature (1225)..(1225): n is a, c, g, or t
  misc_feature (1234)..(1234): n is a, c, g, or t
  misc_feature (1238)..(1238): n is a, c, g, or t
  misc_feature (1247)..(1247): n is a, c, g, or t
gagaaattactatgagaggatcgcatcaccatcaccatcacggatcctatttaggtgacactatagaatcgtcgacccacgcgtccgcagggtctccggtaggggaaggcactggatcgcctcccaagtggcagattggtgagcaggaatttgaagccctcatgcggatgctcgataatctgggctacagaactggctacccttatcgataccctgctctgagagagaagtctaaaaaatacagcgatgtggaggttcctgctagtgtcacaggttactcctttgctagtgacggtgattcgggcacttgctccccactcagacacagttttcagaagcagcagcgggagaagacaagatggctgaactctggccggggcgacgaagcttccgaggaagggcagaatggaagcagtcccaagtcgaagactaagtggactaaagaggatggacatagaacttccacctctgctgtccctaacctgtttgttccattgaacactaacccaaaagaggtccaggagatgaggaacaagatccgagagcagaatttacaggacattaagacggctggccctcagtcccaggttttgtgtggtgtagtgatggacaggagcctcgtccaggatgcacctctctctgactgtacggaaactatcgaagggctcgagcttacagagcagacctttagtcccgctaaatctctctcttttagaaagggagagctggtgacggcctccaaggccatcattgaaaaggagtaccagccccacgtcattgtgagcaccacgggccccaaccccttcaccacactcacagaccgtgagctggaggagtaccgcagggaggtggagaggaagcaaaagggctctgaanaaaatctggacgaggctagagaaccgaaangaaaagagtcctcnnaacnancctgnggttcccccacccgcctccnagnantcccatcaagctggaagaaccaggaaacggatgccctaaaaaagtacctgttaccntaacctngtgccgganccnaatactggaaaagaanntgatgctgccncctttaancnaactccccccgaatttntcccctgangaaacctcnaaaaancccggcttcccannttaaaaaaggngaaaaancccnnaacccccannccccntggaggnccctnatgggggcngccccnanncncccccaaacccaccccgggggtgaaaangngcccccccntttnaagaggggncccc

SEQ ID NO: 416 - DNA, 860 bp, human
  misc_feature (579)..(579): n is a, c, g, or t
cgatactatgagaggtcgcatcaccatcaccatcacggatcctatttaggtgacactatagaatcgtcgactctggaccttggctgtcactcagttaacggaggcttcaagcggcccctagcgccctcaggccggtctccagtggaaggcctgggcagggcccatcggagccctgcctcaccaagggtgcctccggtccccgactacgtggcacaccccgagcgctggaccaagtacagcctggaagatgtgaccgaggtcagcgagcagagcaatcaggccaccgccctggccttcctgggctcccagagcctggctgcccccactgactgcgtgtcctccttcaaccaggatccctccagctgtggggaggggagggtcatcttcaccaaaccagtccgaggggtcgaagccagacacgagaggaagagggtcctggggaaggtgggagagccaggcaggggcggccttgggaatcctgccacagacaggggcgagggccctgtggagctggcccatctggccgggcccgggagcccagaggctgaggagtggggcagcccccatggaggcctgcangaggtggaggcactgtcagggtctgtccacagtgggtctgtgccaggtctcccgccggtggaaactgttggcttccatggcagcaggaagcggagtcgagaccacttccggaaacagagcagcagccccgaggacccaggtgctgaggtctgaaagggagatgggccaccctgaccccctgggcactgccatcctgctgctttccagtggggctggcagggggcaccctggcactgcctagctggaagggaagaacccgcaggtgcccccgtgccccggct

SEQ ID NO: 417 - DNA, 1479 bp, human
  misc_feature (879)..(879): n is a, c, g, or t
  misc_feature (905)..(905): n is a, c, g, or t
  misc_feature (963)..(963): n is a, c, g, or t
  misc_feature (1038)..(1038): n is a, c, g, or t
cgaatattctctttaagagatactagagaggatgcatcaccatcaccatcacggtcgacccacgcgtccgcccacgcgtccgatggagtccatcttccacgagaaacaagaaggctcactttgtgctcaacattgcctgaataacttattgcaaggagaatattttagccctgtggaattatcctcaattgcacatcagctggatgaggaggagaggatgagaatggcagaaggaggagttactagtgaagattatcgcacgtttttacagcagccttctggaaatatggatgacagtggttttttctctattcaggttataagcaatgccttgaaagtttggggtttagaactaatcctgttcaacagtccagagtatcagaggctcaggatcgatcctataaatgaaagatcatttatatgcaattataaggaacactggtttacagttagaaaattaggaaaacagtggtttaacttgaattctctcttgacgggtccagaattaatatcagatacatatcttgcacttttcttggctcaattacaacaggaaggttattctatatttgttgttaagggtgatctgccagattgcgaagctgaccaactcctgcagatgattagggtccaacagatgcatcgaccaaaacttattggagaagaattagcacaactaaaagagcaaagagtccataaaacagacctggaacgagtgttagaagcaaatgatggctcaggaatgttagacgaagatgaggaggatttgcagagggctctggcactaagtcgccaagaaattgacatggaagatgaggaagcagatctccgcagggctattcagctaagtatgcaaaggtagttccagaaacatatctncagatatgacacagacatcaggtacnaatcttacttcagaagagcttcggaagagacgagaagcctactttgaaaaacagcagncaaagcagcaacagcagcagcagcagcagcagcagcagcagcagcagcagcagcagcagcagggggaactatccnggacagagtcactcccatgtgaagggccaccaaccagtcagaaaccctttggaagaatctaggggaggcttaaagggaaaaaaactgcttcggcaatgggaccatgtctttaaaattgcccaaaagattgaaaacaaagaaaaaaaaaaccctaaaaaaaattaaaaatctaccttccacatacccggggataacaaaaaggcccccttggaaaggccaaaaaagggaaaaaactttatgggtgcaaaaaaagaggaagggaaaagccccgtgagaacaaaaattctccaattcccaagggccccaaaaaacctaaattttcaaaaaaaaaaaaagggccgcccccaccatccaattgcctgcaccgataaacaaagcccacacccatgacactcaccgcgggttttgagaaccaactgttattctgaacgaagaaaatac

SEQ ID NO: 418 - DNA, 1179 bp, human
  misc_feature (919)..(919): n is a, c, g, or t
  misc_feature (935)..(935): n is a, c, g, or t
  misc_feature (952)..(952): n is a, c, g, or t
  misc_feature (1014)..(1014): n is a, c, g, or t
  misc_feature (1088)..(1088): n is a, c, g, or t
  misc_feature (1090)..(1090): n is a, c, g, or t
  misc_feature (1094)..(1094): n is a, c, g, or t
  misc_feature (1100)..(1100): n is a, c, g, or t
  misc_feature (1103)..(1103): n is a, c, g, or t
  misc_feature (1106)..(1106): n is a, c, g, or t
  misc_feature (1110)..(1110): n is a, c, g, or t
  misc_feature (1127)..(1128): n is a, c, g, or t
  misc_feature (1134)..(1135): n is a, c, g, or t
  misc_feature (1140)..(1140): n is a, c, g, or t
  misc_feature (1153)..(1153): n is a, c, g, or t
  misc_feature (1162)..(1162): n is a, c, g, or t
  misc_feature (1172)..(1172): n is a, c, g, or t
  misc_feature (1176)..(1176): n is a, c, g, or t
tagagaaattactatgagaggatcgcatcaccatcaccatcacggatcctatttaggtgacactatagaatcgtcgacccacgcgtccggggtccgcggcctgcgctgtagcggtcgccgccgttccctggaagtagcaacttccctaccccaccccagtcctggtccccgtccagccgctgacgtgaagatgagcagctcagaggaggtgtcctggatttcctggttctgtgggctccgtggcaatgaattcttctgtgaagtggatgaagactacatccaggacaaatttaatcttactggactcaatgagcaggtccctcactatcgacaagctctagacatgatcttggacctggagcctgatgaagaactggaagacaaccccaaccagagtgacctgattgagcaggcagccgagatgctttatggattgatccacgcccgctacatccttaccaaccgtggcatcgcccagatgttggaaaagtaccagcaaggagactttggttactgtcctcgtgtgtactgtgagaaccagccaatgcttcccattggcctttcagacatcccaggtgaagccatggtgaagctctactgccccaagtgcatggatgtgtacacacccaagtcatcaagacaccatcacacggatggcgcctacttcggcactggtttccctcacatgctcttcatggtgcatcccgagtaccggcccaagagacctgccaaccagtttgtgcccaggctctacggtttcaagatccatccgatggcctaccagctgcagctccaagccgccagcaacttcaagagcccagtcaagacgattcgctgattccctcccccacctgtcctgcagtctttgacttttcctttcttttttgccaccctttcaggaaccctgtatggtttttantttaaattaaaggaantcgttatcgtggtgggnaatatgaaaataaagtaaaaaaaaaggccatgaactaatctgctggtgcttgctgttggggnaaaggaaaggtgaatggtgtgttggactccaggggcccctcatggcccaaccccccctccccaaaatgaaaacnanaaanatttgngcncangganttggggggggtttttannagggannaaaanaaattcttagatncgtgggatnaatgcagggncaangaa

SEQ ID NO: 419 - DNA, 1161 bp, human
  misc_feature (898)..(898): n is a, c, g, or t
  misc_feature (968)..(968): n is a, c, g, or t
  misc_feature (973)..(973): n is a, c, g, or t
  misc_feature (1001)..(1001): n is a, c, g, or t
  misc_feature (1025)..(1025): n is a, c, g, or t
  misc_feature (1033)..(1033): n is a, c, g, or t
  misc_feature (1037)..(1037): n is a, c, g, or t
  misc_feature (1041)..(1041): n is a, c, g, or t
  misc_feature (1045)..(1045): n is a, c, g, or t
  misc_feature (1060)..(1060): n is a, c, g, or t
  misc_feature (1066)..(1066): n is a, c, g, or t
  misc_feature (1068)..(1068): n is a, c, g, or t
  misc_feature (1080)..(1080): n is a, c, g, or t
  misc_feature (1082)..(1082): n is a, c, g, or t
  misc_feature (1084)..(1084): n is a, c, g, or t
  misc_feature (1088)..(1088): n is a, c, g, or t
  misc_feature (1091)..(1091): n is a, c, g, or t
  misc_feature (1096)..(1096): n is a, c, g, or t
  misc_feature (1099)..(1099): n is a, c, g, or t
  misc_feature (1104)..(1104): n is a, c, g, or t
  misc_feature (1106)..(1106): n is a, c, g, or t
  misc_feature (1130)..(1130): n is a, c, g, or t
  misc_feature (1143)..(1143): n is a, c, g, or t
  misc_feature (1156)..(1156): n is a, c, g, or t
  misc_feature (1160)..(1160): n is a, c, g, or t
tagagaaattactatgagaggatcgcatcaccatcaccatcacggatcctatttaggtgacactatagaatcgtcgacccacgcgtccgggctggacatcagcagtgtcaacagtctggcagaggtgcacagactttatgtaggggggcctcccttagagaaggagcctcgagaactgtttgtgaagggcaccatgaaggacattcgtgagaacttccaggacctgatgcagtactgtgcccaggacgtgtgggccacccatgaggttttccagcagcagctaccgctcttcttggagaggtgtccccacccagtgactctggccggcatgctggagatgggtgtctcctacctgcctgtcaaccagaactgggagcgttacctggcagaggcacagggcacttatgaggagctccagcgggagatgaagaagtcgttgatggatctggccaatgatgcctgccagctgctctcaggagagaggtacaaagaagacccctggctctgggacctggagtgggacctgcaagaatttaagcagaagaaagctaagaaggtgaagaaggaaccagccacagccagcaagttgcccatcgagggggctggggcccctggtgatcccatggatcaggaagacctcggcccctgcagtgaggaggaggagtttcaacaagatgtcatggcccgcgcctgcttgcagaagctgaaggggaccacagagctcctgcccaagcggccccagcaccttcctggacaccctggatggtaccggaagctctgcccccggctagacgaccctgcatggaccccgggccccagcctcctcagcctgcagatgcgggtcacacctaaactcatggcacttacctgggatggcttccctctgcactactcaaancgtcatggctggggctacttggtgcctgggcggcgggacaacctggccaagctgccgacaggtaccaccntggantcagctgggggggtctgcccctacaaanccatcgagtccctgtacagaaacnctgtctcnaaangggnaacnaccacctgatgcccnagaagncngcctggcgaaanantnctgntcnctganaanatgcntntggcaaacggtaaaaaactggatnattaaaatggagnttaagccaaatgnaaant

SEQ ID NO: 420 - DNA, 1144 bp, human
  misc_feature (792)..(792): n is a, c, g, or t
  misc_feature (796)..(796): n is a, c, g, or t
  misc_feature (829)..(829): n is a, c, g, or t
  misc_feature (874)..(874): n is a, c, g, or t
  misc_feature (897)..(897): n is a, c, g, or t
  misc_feature (922)..(922): n is a, c, g, or t
  misc_feature (930)..(930): n is a, c, g, or t
  misc_feature (932)..(932): n is a, c, g, or t
  misc_feature (938)..(938): n is a, c, g, or t
  misc_feature (940)..(940): n is a, c, g, or t
  misc_feature (952)..(952): n is a, c, g, or t
  misc_feature (960)..(960): n is a, c, g, or t
  misc_feature (965)..(965): n is a, c, g, or t
  misc_feature (985)..(985): n is a, c, g, or t
  misc_feature (998)..(998): n is a, c, g, or t
  misc_feature (1004)..(1004): n is a, c, g, or t
  misc_feature (1010)..(1011): n is a, c, g, or t
  misc_feature (1013)..(1013): n is a, c, g, or t
  misc_feature (1023)..(1023): n is a, c, g, or t
  misc_feature (1028)..(1028): n is a, c, g, or t
  misc_feature (1037)..(1037): n is a, c, g, or t
  misc_feature (1040)..(1040): n is a, c, g, or t
  misc_feature (1050)..(1050): n is a, c, g, or t
  misc_feature (1066)..(1066): n is a, c, g, or t
  misc_feature (1075)..(1075): n is a, c, g, or t
  misc_feature (1081)..(1081): n is a, c, g, or t
  misc_feature (1087)..(1088): n is a, c, g, or t
  misc_feature (1091)..(1091): n is a, c, g, or t
  misc_feature (1094)..(1095): n is a, c, g, or t
  misc_feature (1097)..(1097): n is a, c, g, or t
  misc_feature (1099)..(1099): n is a, c, g, or t
  misc_feature (1109)..(1109): n is a, c, g, or t
  misc_feature (1114)..(1114): n is a, c, g, or t
  misc_feature (1122)..(1122): n is a, c, g, or t
  misc_feature (1124)..(1124): n is a, c, g, or t
  misc_feature (1138)..(1138): n is a, c, g, or t
tagagaaattactatgagaggatcgcatcaccatcaccatcacggatcctatttaggtgacactatagaatcgtcgacccacgcgtccggaaccctgaggcgggcccggcaagccttccctgcggccggcagagcccaacgactagtgggactccgcgggggcgggggtagctggagcctggctctggcctggcaggagccgagctcgttccggaagaagccgagcggacgggggccagcctcagcgtcccgggagtgaggcgatagctgcggcggcgacagcgcgggccgggatgaaccgcgacggctgaggcagcggaggtgccggctgcgcgggccccagtgagactccctcgaagcgccagcccaccgttcggggctttgcctcgagccgagccctgcccccgcgagcctcccggacccctttgtgcggccggaggcggcggcgggaacggccatggcggccaacatgtaccgggtgggagattacgtctattttgagaactcttccagcaatccttacctggttagacggattgaggagctcaacaagactgcaaatggaaatgtggaggcaaaggttgtctgtcttttccggcgcagggacatttctagtagcctcaacagcctggctgatagtaatgccagggagtttgaagaggaatcaaagcagccaggggtgtctgagcagcagcgccatcaactgaagcaccgggaactttttctttctcggcaatttgaatcattaccagccacccacatacgggggaaatgcagtgtgaccctcttgantganacagatatcttgagccagtacctggaaaaggangactgcttttttttactcactggtgtttgaccccgtgcaaaaaanactttctcgctgatcagggcganattaaaattggttgcaaataccaanctgaaatncnaaatcncntaataaaggganaatctganattcngaaccaccaaaaatgaaatnaaagttttggganccaaanaacccnntnccaaaacggnaaatnaacaatttnttntgggggcccnaactggggaaactttncaaaaaccntaaatntaacanntcnttnngnanccaaacttgnaaatnaatgcacntnctccctcccaaaanttactt

SEQ ID NO: 421 - DNA, 1204 bp, human
  misc_feature (859)..(859): n is a, c, g, or t
  misc_feature (882)..(882): n is a, c, g, or t
  misc_feature (900)..(900): n is a, c, g, or t
  misc_feature (913)..(913): n is a, c, g, or t
  misc_feature (940)..(940): n is a, c, g, or t
  misc_feature (943)..(943): n is a, c, g, or t
  misc_feature (984)..(984): n is a, c, g, or t
  misc_feature (1004)..(1004): n is a, c, g, or t
  misc_feature (1027)..(1027): n is a, c, g, or t
  misc_feature (1046)..(1046): n is a, c, g, or t
  misc_feature (1079)..(1081): n is a, c, g, or t
  misc_feature (1101)..(1101): n is a, c, g, or t
  misc_feature (1103)..(1104): n is a, c, g, or t
  misc_feature (1108)..(1108): n is a, c, g, or t
  misc_feature (1111)..(1111): n is a, c, g, or t
  misc_feature (1122)..(1124): n is a, c, g, or t
  misc_feature (1127)..(1127): n is a, c, g, or t
  misc_feature (1129)..(1129): n is a, c, g, or t
  misc_feature (1131)..(1131): n is a, c, g, or t
  misc_feature (1136)..(1136): n is a, c, g, or t
  misc_feature (1143)..(1143): n is a, c, g, or t
  misc_feature (1148)..(1148): n is a, c, g, or t
  misc_feature (1167)..(1167): n is a, c, g, or t
  misc_feature (1172)..(1173): n is a, c, g, or t
  misc_feature (1175)..(1175): n is a, c, g, or t
  misc_feature (1186)..(1186): n is a, c, g, or t
aatagagagattactatgagaggatcgcatcaccatcaccatcacggatcctatttaggtgacactatagaatcgtcgacccacgcgtccgataactccaagtcagactcctgccgggaggtgactgtaactcccaacgcagcctggggtggagagggcagtctgggatgtggcattggctatgggtatctacaccggatcccaactcagccccccagctaccacaagaagccacctggcaccccaccaccttctgctctaccacttggtgccccaccacctgatgctctaccacctggacccacccccgaggactctccttccctggagacaggttccaggcagagtgactacatggaggccctgctgcaggcacctggctcctccatggaggatccccttcctgggcctgggagtcccagccacagtgctccagaccctgatggacttccccatttcatggagactcctcttcagcccccacctccagtgcagcgagttatggacccaggcttcctggacgtgtcgggaatttctctcttggacaacagcaatgccagtgtgtggcccagcctgccctcttccacagaactgaccaccacagctgtctcaacctcagggccagaggacatctgctccagcagcagttctcatgagcggggtggtgaggctacatggtctgggtcagagtttgaggtctccttcctggacagcccaggtgcccaagcccaggcggaccacctgcctcagctgactcttcctgacagtctcacctctgcagcctcaccaaaagatgggctgtccgccgagctgcttgaagctcaggctgaggaggaaccagcaagcacagagggcctanatactgggacggaagctgagggnctggacagccaggcccanatctctaccacanaataacaccctggggctgtgacaaggnccnatgatgaaatttcatgaggcccaaatgtgggcaggcagccngggctgcactatgcggtcangattcttgctgctttggtgggantgaaggcctcatgggtggngaaaaggggcccatgggcccttgggggaagaannnttttggccgggaaccctcangnncagnggntgggccctgcnnnggncncnggggnttcccanaaagnaaacagggtttggtcttantccanntnaaaaaaaattnaaaaaaaaagggtttctt

SEQ ID NO: 422 - DNA, 1114 bp, human
  misc_feature (910)..(910): n is a, c, g, or t
  misc_feature (913)..(913): n is a, c, g, or t
  misc_feature (916)..(916): n is a, c, g, or t
  misc_feature (920)..(920): n is a, c, g, or t
  misc_feature (953)..(953): n is a, c, g, or t
  misc_feature (955)..(955): n is a, c, g, or t
  misc_feature (977)..(977): n is a, c, g, or t
  misc_feature (985)..(987): n is a, c, g, or t
  misc_feature (990)..(990): n is a, c, g, or t
  misc_feature (993)..(993): n is a, c, g, or t
  misc_feature (1012)..(1012): n is a, c, g, or t
  misc_feature (1022)..(1022): n is a, c, g, or t
  misc_feature (1024)..(1024): n is a, c, g, or t
  misc_feature (1030)..(1030): n is a, c, g, or t
  misc_feature (1033)..(1033): n is a, c, g, or t
  misc_feature (1039)..(1039): n is a, c, g, or t
  misc_feature (1041)..(1041): n is a, c, g, or t
  misc_feature (1045)..(1045): n is a, c, g, or t
  misc_feature (1053)..(1053): n is a, c, g, or t
  misc_feature (1058)..(1058): n is a, c, g, or t
  misc_feature (1063)..(1063): n is a, c, g, or t
  misc_feature (1070)..(1070): n is a, c, g, or t
  misc_feature (1092)..(1092): n is a, c, g, or t
  misc_feature (1094)..(1094): n is a, c, g, or t
  misc_feature (1096)..(1096): n is a, c, g, or t
  misc_feature (1100)..(1100): n is a, c, g, or t
  misc_feature (1102)..(1102): n is a, c, g, or t
  misc_feature (1104)..(1104): n is a, c, g, or t
tagaggaaattactatgagaggatcgcatcaccatcaccatcacggatcctatttaggtgacactatagaatcgtcgacccacgcgtccgcccacgcgtccggtgggaagacttttagattaagacaacaactagttcgccatcagagaatacatactcgtgagaaaccctatgaatgtatggaatgttggaagacctttagtagttactcacagcttatttcacaccagagcattcatattggtgagagaccctatgaatgtgaagagtgtggaaaggcctttagactgctctcacaacttactcagcatcaaagtattcacactggtgagaaaccttatgaatgtaaggaatgtagaaaaccttttagactgctctcacaacttacccaacatcagagtattcacactggtgagaaaccttatgaatgtaaggaatgtggtaaggcttttagactttattcatttcttactcaacaccagagaattcatactggtgagaagccctacaagtgtaaggagtgtaagaaggcctttagacagcattcacaccttactcagcatcagaagattcataatggaatttaatagaagaaagccttcaaatgtatatgatgttacagaacatcagaaaattcatttttgagaaaatgtgtttcatgctcaattccaagcataataaattttatattagagaaagaatatgttgatttaaaagccttccaacaccatttaaacatggtttatcttcagcaaattcctatgagagaataatgtaatgaatgtaggaaaatctttagccttatctgtcattatctccctttctccacttgattaccagtttgatttattggacaagatactaagcttctgtgcctcattttgctgacttgtaaaatggtaataatagnacntanatgnattagttatttattgctgcgtaataaattaccncngacttagtagcctaaaataccntataattnnntcntanaatttggatcaggagtatnggcctgactnanttgggnccnctgctncngggncccttgcnagggntacanatttccncccggggctgagggtcccctcngnanggcncncntgggggaagg

SEQ ID NO: 423 - DNA, 931 bp, human
  misc_feature (762)..(762): n is a, c, g, or t
  misc_feature (778)..(778): n is a, c, g, or t
  misc_feature (786)..(786): n is a, c, g, or t
  misc_feature (798)..(798): n is a, c, g, or t
  misc_feature (803)..(803): n is a, c, g, or t
  misc_feature (806)..(806): n is a, c, g, or t
  misc_feature (810)..(810): n is a, c, g, or t
  misc_feature (834)..(834): n is a, c, g, or t
  misc_feature (839)..(839): n is a, c, g, or t
  misc_feature (850)..(851): n is a, c, g, or t
  misc_feature (858)..(858): n is a, c, g, or t
  misc_feature (861)..(861): n is a, c, g, or t
  misc_feature (866)..(866): n is a, c, g, or t
  misc_feature (868)..(868): n is a, c, g, or t
  misc_feature (876)..(876): n is a, c, g, or t
  misc_feature (879)..(879): n is a, c, g, or t
  misc_feature (896)..(896): n is a, c, g, or t
  misc_feature (910)..(910): n is a, c, g, or t
  misc_feature (912)..(913): n is a, c, g, or t
  misc_feature (919)..(920): n is a, c, g, or t
  misc_feature (926)..(926): n is a, c, g, or t
  misc_feature (928)..(928): n is a, c, g, or t
aattagagaaattactatgagaggatcgcatcaccatcaccatcacggatcctatttaggtgacactatagaatcgtcgacccacgcgtccgtgcttggggtagcgggagggcagactctgggcgccactcccgggccggtcatgaacgggccggcggacggcgaagtggactacaaaaaaaaataccggaatctgaagcggaagctcaagttcctcatctacgagcacgagtgcttccaggaggagctgaggaaagcgcaaaggaaattactgaaggtgtcccgggacaagagtttcctcctagaccgacttctgcagtacgagaacgtggatgaagactcttcggactcagatgccactgcatcatcagataacagcgagacggaggggacacccaagttgtctgacacaccggcccctaagaggaagagaagccctccgctggggggcgccccctctccctccagcctctccctgcctccttcaacagggtttccccttcaggcctccggggtcccctccccatacctgagctcgagcgcgcgctctggctgccgtgcggaggagctggatctgggagaggctgcgggcagggagtccagttaggaggctgggaccgcagcccagatggcggtgggaccccccgactgccctgtgggagggccgctgaccttccctggccggggttctggggctgggggtcgggacaaccctgacccccctcccaccccctaaaaatgccccccccccacgatcctgancacggtccctcggcanatgttcancgatgcaggtancgggnacnatgncttggatggaaacaatgacctggngatcnacatcccgganntgaccgnganatcangnccttgccnacnagggccccgcccggggnccttccccgtggcnannaaaaannaattcngnttt

SEQ ID NO: 424 - DNA, 1179 bp, human
  misc_feature (906)..(906): n is a, c, g, or t
  misc_feature (917)..(917): n is a, c, g, or t
  misc_feature (950)..(950): n is a, c, g, or t
  misc_feature (961)..(961): n is a, c, g, or t
  misc_feature (975)..(975): n is a, c, g, or t
  misc_feature (1003)..(1003): n is a, c, g, or t
  misc_feature (1007)..(1007): n is a, c, g, or t
  misc_feature (1023)..(1023): n is a, c, g, or t
  misc_feature (1049)..(1049): n is a, c, g, or t
  misc_feature (1075)..(1075): n is a, c, g, or t
  misc_feature (1089)..(1089): n is a, c, g, or t
  misc_feature (1096)..(1096): n is a, c, g, or t
  misc_feature (1098)..(1098): n is a, c, g, or t
  misc_feature (1109)..(1109): n is a, c, g, or t
  misc_feature (1114)..(1114): n is a, c, g, or t
  misc_feature (1127)..(1128): n is a, c, g, or t
  misc_feature (1137)..(1137): n is a, c, g, or t
  misc_feature (1150)..(1153): n is a, c, g, or t
  misc_feature (1161)..(1161): n is a, c, g, or t
  misc_feature (1164)..(1164): n is a, c, g, or t
  misc_feature (1172)..(1172): n is a, c, g, or t
  misc_feature (1176)..(1177): n is a, c, g, or t
aaatagagaaattactatgagaggatcgcatcaccatcaccatcacggatcctatttaggtgacactatagaatcgtcgacccacgcgtccgggggctctggtgccgggctgagcgggggaagcaggggtagcggagccatgggggacgctcccagccctgaagagaaactgcaccttatcacccggaacctgcaggaggttctgggggaagagaagctgaaggagatactgaaggagcgggaacttaaaatttactggggaacggcaaccacgggcaaaccacatgtggcttactttgtgcccatgtcaaagattgcagacttcttaaaggcagggtgtgaggtaacaattctgtttgcggacctccacgcatacctggataacatgaaagccccatgggaacttctagaactccgagtcagttactatgagaatgtgatcaaagcaatgctggagagcattggtgtgcccttggagaagctcaagttcatcaaaggcactgattaccagctcagcaaagagtacacactagatgtgtacagactctcctccgtggtcacacagcacgattccaagaaggctggagctgaggtggtaaagcaggtggagcaccctttgctgagtggcctcttataccccggactgcaggctttggatgaagagtatttaaaagtagatgcccaatttggaggcattgatcagagaaagattttcacctttgcagagaagtacctccctgcacttggctattcaaaacgggtccatctgatgaatcctatggttccaggattaacaggcagcaaaatgagctcttcagaagaggagtccaagattgatctccttgatcggaaggaggatgtgaagaaaaaactgaagaaggccttctgtgagccaggaatgtgganaacaatggggnttctgtccttcatcaagcatgtcctttttcccnttaagtccgantttgtgatcctacnaaatgaaaaatggggtggaaacaaaacntacncagcttacgtggaacntggaaaaggactttgctgctgaggtngtacctcctggaaaacctgaaaaatnttgttgaaatcccnctgaaananttgctggatcnatccnggaaaagtttaanncccctgccntgaaaaactggcnnnncttccttnccnaattcctnaaannaa

SEQ ID NO: 425 - DNA, 450 bp, human
  misc_feature (4)..(4): n is a, c, g, or t
  misc_feature (299)..(299): n is a, c, g, or t
  misc_feature (326)..(326): n is a, c, g, or t
  misc_feature (332)..(332): n is a, c, g, or t
  misc_feature (356)..(356): n is a, c, g, or t
  misc_feature (373)..(373): n is a, c, g, or t
  misc_feature (376)..(376): n is a, c, g, or t
  misc_feature (384)..(384): n is a, c, g, or t
  misc_feature (390)..(390): n is a, c, g, or t
  misc_feature (392)..(392): n is a, c, g, or t
  misc_feature (397)..(397): n is a, c, g, or t
  misc_feature (404)..(404): n is a, c, g, or t
  misc_feature (407)..(407): n is a, c, g, or t
  misc_feature (409)..(409): n is a, c, g, or t
  misc_feature (415)..(415): n is a, c, g, or t
  misc_feature (420)..(421): n is a, c, g, or t
  misc_feature (424)..(424): n is a, c, g, or t
  misc_feature (435)..(435): n is a, c, g, or t
  misc_feature (437)..(437): n is a, c, g, or t
  misc_feature (442)..(442): n is a, c, g, or t
  misc_feature (447)..(447): n is a, c, g, or t
  misc_feature (449)..(450): n is a, c, g, or t
gatngagaaattactatgagaggatcgcatcaccatcaccatcacggaatcctatttaggtgacactatagaatcgtcgacccacgcgtccgacttggaccacgggaaggcctggggcatcctgaccttcaaagggaagactgagagcgaggcgcgggagatcgaacacgtcatgtaccatgactggcggctggtgcccaagcacgaggaggaggccttcaccgcgttcacgccggcgccggaagacagcctggcctccgtgccgtacccgcctctcctccgggccatgattatcgcanaacgacagaaaaatggaaacccaagcnccgagnaacccatgctgaatgtgcaaaganacccatggaaccctggnatnaccctgcnaaaaangnaaaanaaagganggncnagggcnccccnnttnaaatgccaaancnccggngggcntnn

SEQ ID NO: 426 - DNA, 1131 bp, human
  misc_feature (885)..(885): n is a, c, g, or t
  misc_feature (889)..(889): n is a, c, g, or t
  misc_feature (895)..(895): n is a, c, g, or t
  misc_feature (910)..(910): n is a, c, g, or t
  misc_feature (951)..(951): n is a, c, g, or t
  misc_feature (960)..(960): n is a, c, g, or t
  misc_feature (977)..(977): n is a, c, g, or t
  misc_feature (983)..(983): n is a, c, g, or t
  misc_feature (996)..(996): n is a, c, g, or t
  misc_feature (1009)..(1009): n is a, c, g, or t
  misc_feature (1020)..(1020): n is a, c, g, or t
  misc_feature (1029)..(1029): n is a, c, g, or t
  misc_feature (1033)..(1033): n is a, c, g, or t
  misc_feature (1063)..(1063): n is a, c, g, or t
  misc_feature (1068)..(1068): n is a, c, g, or t
  misc_feature (1074)..(1074): n is a, c, g, or t
  misc_feature (1080)..(1082): n is a, c, g, or t
  misc_feature (1086)..(1087): n is a, c, g, or t
  misc_feature (1091)..(1092): n is a, c, g, or t
  misc_feature (1098)..(1098): n is a, c, g, or t
  misc_feature (1102)..(1102): n is a, c, g, or t
  misc_feature (1113)..(1114): n is a, c, g, or t
  misc_feature (1119)..(1119): n is a, c, g, or t
  misc_feature (1127)..(1128): n is a, c, g, or t
aatagagaaattactatgagaggatcgcatcaccatcaccatcacggatcctatttaggtgacactatagaatcgtcgacccacgcgtccgcccacgcgtccggggagaggcaggagagcccgagacttggaaaccccaaagtgtccgcgaccctgcacggcaggctcccttccagcttcatgggcaaagtgtggaaacagcagatgtaccctcagtacgccacctactattacccccagtatctgcaagccaagcagtctctggtcccagcccaccccatggcccctcccagtcccagcaccaccagcagtaataacaacagtagcagcagtagcaactcaggatgggatcagctcagcaaaacgaacctctatatccgaggactgcctccccacaccaccgaccaggacctggtgaagctctgtcaaccatatgggaaaatagtctccacaaaggcaattttggataagacaacgaacaaatgcaaaggttatggttttgtcgactttgacagccctgcagcagctcaaaaagctgtgtctgccctgaaggccagtggggttcaagctcaaatggcaaagcaacaggaacaagatcctaccaacctctacatttctaatttgccactctccatggatgagcaagaactagaaaatatgctcaaaccatttggacaagttatttctacaaggatactacgtgattccagtggtacaagtcgtggtgttggctttgctaggatggaatcaacagaaaaaatgtgaagctgttattggtcattttaatggaaaatttattaagacaccaccaggagtttctgcccccacagaacctttattgtgtaagttttgctgatggaggacagaaaaaagagacagaacccnaacnaatacntcccctaatgggaanaaccatgggcataaaagaaggaaaaggtgagacttgctggnaatgacacnttactttaagacccaanctacangctggctataaanaaacggaattttntcctttcaccnattcaggtnttgnctacaaaccgaatggatcctcaaacttctnttaanccctanattgcnnncccnngtanntgcccnacanggggcaaagtnnttcgnggatgcannctc

SEQ ID NO: 427 - DNA, 1178 bp, human
  misc_feature (12)..(12): n is a, c, g, or t
  misc_feature (905)..(905): n is a, c, g, or t
  misc_feature (952)..(952): n is a, c, g, or t
  misc_feature (955)..(955): n is a, c, g, or t
  misc_feature (964)..(964): n is a, c, g, or t
  misc_feature (983)..(983): n is a, c, g, or t
  misc_feature (990)..(990): n is a, c, g, or t
  misc_feature (992)..(992): n is a, c, g, or t
  misc_feature (994)..(994): n is a, c, g, or t
  misc_feature (997)..(997): n is a, c, g, or t
  misc_feature (1001)..(1001): n is a, c, g, or t
  misc_feature (1006)..(1006): n is a, c, g, or t
  misc_feature (1015)..(1015): n is a, c, g, or t
  misc_feature (1027)..(1027): n is a, c, g, or t
  misc_feature (1032)..(1032): n is a, c, g, or t
  misc_feature (1036)..(1036): n is a, c, g, or t
  misc_feature (1046)..(1046): n is a, c, g, or t
  misc_feature (1089)..(1089): n is a, c, g, or t
  misc_feature (1094)..(1094): n is a, c, g, or t
  misc_feature (1097)..(1097): n is a, c, g, or t
  misc_feature (1099)..(1099): n is a, c, g, or t
  misc_feature (1106)..(1106): n is a, c, g, or t
  misc_feature (1114)..(1114): n is a, c, g, or t
  misc_feature (1122)..(1122): n is a, c, g, or t
  misc_feature (1125)..(1125): n is a, c, g, or t
  misc_feature (1128)..(1128): n is a, c, g, or t
  misc_feature (1140)..(1140): n is a, c, g, or t
  misc_feature (1142)..(1142): n is a, c, g, or t
  misc_feature (1147)..(1147): n is a, c, g, or t
  misc_feature (1149)..(1149): n is a, c, g, or t
  misc_feature (1157)..(1157): n is a, c, g, or t
  misc_feature (1160)..(1160): n is a, c, g, or t
  misc_feature (1170)..(1170): n is a, c, g, or t
agagaaaattanctatgagaggatcgcatcaccatcaccatcacggatcctatttaggtgacactatagaatcgtcgacccacgcgtccgcggacgcgtgggcgggatcagtggccgacagcgatgccgtggtgaaactagatgatggccatttaaacaactctttgagctctccagttcaagcggacgtgtacttcccacgactgatagttccattttgtgggcacattaaaggtggcatgagaccaggcaagaaggtgttagtgatgggcatcgtagacctcaacccagagagctttgcaatcagcttgacctgtggggactcagaagaccctcctgccgatgtggcaatcgaactcaaagctgtgttcacagatcggcagctactcagaaattcttgtatatctggggagaggggtgaagaacagtcagcaatcccttactttccattcattccagaccagccattcagggtggaaattctttgtgagcacccacgtttccgagtgtttgtggatggacaccaactttttgatttttaccatcgcattcaaacgttatctgcaattgacaccataaagataaatggagacctccagatcaccaagcttggctgatttaaaccacctctatttcaaataggatcacgtgccacaactatctgactgttggtctggaagaagtgtcctagcaagatctggagacttaaaaagaaaacaaaaacaaatggcaagtttcacttaagggtggtttgcccttaagaagaaagctgttgggacaaagacaccgagccattatacccagaataaaataatacatttatgctggattttattcagaccaaactaaaatggatttgtgatgatttgtgatttggtagcaaattattcatcttttcaaagcanggcaatgcttaaaaacagaagtgctaaagacacttaaaagccaacancancggtacagngaatcaatgcatttctgcnctaaagngnantgngtancacanccaaatttnagccgggtattncatanaagnaggtggttcnaggttgactttttttggtttgggtttggtttgggtttggttgnccacnaangntaattcnaatgtgancttctggnttnttntttacccagggngnataanangaaatgtncanaacccagtgnaactttga

SEQ ID NO: 428 - DNA, 924 bp, human
  misc_feature (755)..(755): n is a, c, g, or t
  misc_feature (762)..(762): n is a, c, g, or t
  misc_feature (798)..(798): n is a, c, g, or t
  misc_feature (807)..(808): n is a, c, g, or t
  misc_feature (831)..(831): n is a, c, g, or t
  misc_feature (840)..(840): n is a, c, g, or t
  misc_feature (862)..(862): n is a, c, g, or t
  misc_feature (867)..(867): n is a, c, g, or t
  misc_feature (874)..(874): n is a, c, g, or t
  misc_feature (876)..(877): n is a, c, g, or t
  misc_feature (882)..(882): n is a, c, g, or t
  misc_feature (887)..(887): n is a, c, g, or t
  misc_feature (891)..(891): n is a, c, g, or t
  misc_feature (893)..(895): n is a, c, g, or t
  misc_feature (909)..(909): n is a, c, g, or t
  misc_feature (915)..(916): n is a, c, g, or t
tagagaaattactatgagaggatcgcatcaccatcaccatcacggatcctatttaggtgacactatagaatcgtcgacccacgcgtccgaggaggagtacgccgacccgttcgcgctggcgcagcacaaatgctcgcgcatcgtgcgtgtggagtaccgctgtcccgagtgcgccaaggtcttcagctgcccggccaacctggcctcgcaccgccgctggcacaaaccgcggcccgcgcccgccgccgcccgcgcgccggagccagaagcagcagccagggctgaggcgcgggaggcacccggcggcggcagcgaccgggacacgccgagccccggcggcgtgtccgagtcgggctccgaggacgggctctacgagtgccatcactgcgccaagaagttccgccgccaggcctacctacgcaagcacctgctggcgcaccaccaggcgctgcaggccaagggcgcgccgctagcgcccccggccgaggacctactggccttgtaccccgggcccgacgagaaggcgccccaggaggcggccggcgacggcgagggggccggcgtgctgggcctgagtgcgtccgccgagtgccacctgtgcccagtgtgcggagagtcgttcgccagcaagggcgctcaggagcgccacctgcgcctgctgcacgccgcccaggtgttcccctgcaagtactgcccggccaccttctacagctcgcccggccttacgcggcacatcaacaagtgccacccatccnaaaacanacaggtgatcctcctgcaggtgcccgtgcgcccggnctgctaaanngcgcccttccaccccggcccccnaattgtgcnttccttggaaaaccaaaaaaanagtgngccctgnannccccnaaccnaatncnnnctgggggaacctcncccccnncccccacc

SEQ ID NO: 429 - DNA, 826 bp, human
  misc_feature (817)..(817): n is a, c, g, or t
  misc_feature (824)..(824): n is a, c, g, or t
cttaagagagaattaactatgagaggatcgcatcaccatcaccatcacggatcctatttaggtgacactatagaatcgtcgacccacgcgtccgctggtgtgaaaccatataagtgtaaacaatgtggtaaggcctttactcgttccactacccttccagtacatgaaagaactcacacaggagtgaatgccgatgaatgtaaagaatgtgggaatgcattcagttttcctagtgaaattcgtagacataaaaggtctcacactggagaaaaaccctatgagtgtaagcaatgtgggaaagtcttcatttctttcagttccattcagtatcataagatgactcacactggagagaaaccctatgaatgtaagcagtgtgggaaagcctttagatgtggctcacaccttcaaaagcatggaaggactcacactggagagaaaccctatgaatgtaggcaatgtggtaaagccttcagatgtacctcggaccttcaaaggcatgaaaagacacacactgaggataaaccctatggatgtaagcagtgtgggaaaggctttagatgtgcttcacaacttcaaattcatgaaaggacgcacagtggagagaaaccccatgaatgtaaggaatgtggaaaagtattcaagtatttttcttccttgcgtatacatgaaaggacgcacactggagagaagccccatgaatgtaagcaatgtggaaaagcattcaggtatttctcttccttgcatatacatgaaaaggacacacactggagataagccatatgagtgtaaggtatgtggcaaagccttcccttgnttccagntc

SEQ ID NO: 430 - DNA, 828 bp, human
  misc_feature (793)..(793): n is a, c, g, or t
  misc_feature (797)..(797): n is a, c, g, or t
  misc_feature (804)..(805): n is a, c, g, or t
  misc_feature (809)..(809): n is a, c, g, or t
  misc_feature (811)..(828): n is a, c, g, or t
aaaaaattaagagatactatgagaggtcgcatcaccatcaccatcacggatcctatttaggtgacactatagaatcgtcgactctggaccttggctgtcactcagttggaggacccttgacctctggcccaagatggtggcgcccagagcttcgctcttgctgctcccctgagagaggcgtttccatcaaccagttttgcaaggagttcaatgagaggacaaaggacatcaaggaaggcattcctctgcctaccaagattttagtgaagcctgacaggacatttgaaattaagattggacagcccactgtttcctacttcctgaaggcagcagctgggattgaaaagggggcccggcaaacagggaaagaggtggcaggcctggtgaccttgaagcatgtgtatgagattgcccgcatcaaagctcaggatgaggcatttgccctgcaggatgtacccctgtcgtctgttgtccgctccatcatcgggtctgcccgttctctgggcattcgcgtggtgaaggacctcagttcagaagagcttgcagctttccagaaggaacgagccatcttcctggctgctcagaaggaggcagatttggctgcccaagaagaagctgccaagaagtgacccttgccccaccaactcccagatttcaaaggaggtagttgcaaaagctgtgcccaagggggaggaaaggaggtcacaccatatgatgatggttttcatgactttgaatgatatatttttgtacatctagctgtatcgaggcatcaggcctgaaataacatccnttcntacaaannaaanannnnnnnnnnnnnnnnnn

SEQ ID NO: 431 - DNA, 889 bp, human
  misc_feature (806)..(806): n is a, c, g, or t
  misc_feature (888)..(888): n is a, c, g, or t
agatactatgagaggtcgcatcaccatcaccatcacggatcctatttaggtgacactatagaatcgtcgactctggaccttggctgtcactcagttacgaagacctacacctgcaacgtagatcacaagcccagcaacaccaaggtggacaagagagttgcacctgagttcctggggggaccatcagtcttcctgttccccccaaaacccaaggacactctcatgatctcccggacccctgaggtcacgtgcgtggtggtggacgtgagccaggaagaccccgaggtccagttcaactggtacgtggatggcgtggaggtgcataatgccaagacaaagccgcgggaggagcagttcaacagcacgtaccgtgtggtcagcgtcctcaccgtcctgcaccaggactggctgaacggcaaggagtacaagtgcaaggtctccaacaaaggcctcccgtcctccatcgagaaaaccatctccaaagccaaagggcagccccgagagccacaggtgtacaccctgcccccatcccaggaggagatgaccaagaaccaggtcagcctgacctgcctggtcaaaggcttctaccccagcgacatcgccgtggagtgggagagcaatgggcagccggagaacaactacaagaccacgcctcccgtgctggactccgacggctccttcttcctctacagcaggctaaccgtggacaagagcaggtggcaggaggggaatgtcttctcatgctccgtgatgcatgaagctctgcacaaccactacacacagaagagcctctccctgtctctggntaaaatgagtgcagggcggcaaagccccgctcccggggctctcgggtcgcgcgagaatgctgcacgtacccgtctactactnc

SEQ ID NO: 432 - DNA, 836 bp, human
agatactatgagaggtcgcatcccatcaccatcacggatcctatttaggtgacactatacattcgtcgactctggaccttggctgtcactcagttaaaaagcttatgctcgaacggattcagcacgcagtgcagcttgccacagagccacttgagaaagctgtgcagtccagactcacgggagaggaagtcaacagctgtgtggaggtgttgctggaagaagccaaggatttgctctctgactggctggattctacacttggctgtgatgtcactgacaattccatcttctccaagctgcccaagttctgggagggggacttccacagagacatggaagctctgaatgttctccctccagatgtcttaacccgggttagtgagtatgtgccagaaattgtgaactttgtccagaagattgtggacaacggttacggctatgtctccaatgggtctgtctactttgatacagcgaagtttgcttctagcgagaagcactcctatgggaagctggtgcctgaggccgttggagatcagaaagcccttcaagaaggggaaggtgacctgagcatctctgcagaccgcctgagtgagaagcgctctcccaacgactttgccttatggaaggcctctaagcccggagaaccgtcctggccgtgcccttggggaaagggtcgtccgggctggcatatcgagtgctcggccatggcaggcaccctcctaggggcttcaatggaattcccggaggtgggtcgaactccggttccccaccattgaaatgagctggccaagtcggaggccactttgaaacgactgggggttcagtacttcctgcac

SEQ ID NO: 433 - DNA, 845 bp, human
  misc_feature (742)..(742): n is a, c, g, or t
  misc_feature (812)..(812): n is a, c, g, or t
  misc_feature (830)..(830): n is a, c, g, or t
  misc_feature (838)..(838): n is a, c, g, or t
  misc_feature (843)..(843): n is a, c, g, or t
  misc_feature (845)..(845): n is a, c, g, or t
gagaattactatgagaggatgcatcccatcaccatcacggatcctatttaggtgacactatagaatcgtcgactctggaccttggctgtcactcagttaagaacatggaggccaagaaactctccaaggaccggatgaagaagtacatggcaagaaggaaatggcagaaaacgggcaatgctgtgagagccattggaagactgtcctctatggcaatgatctcagggctcagtggcaggaaatcctcaacagggtcaccaaccagcccgctcaatgcagaaaaactagaatctgaagaagatgtgtcccaagctttccttgaggctgttgctgaggaaaagcctcatgtaaaaccctatttctctaagaccattcgcgatttagaagttgtggagggaagtgctgctagatttgactgcaagattgaaggatacccagaccccgaggttgtctggttcaaagatgaccagtcaatcagggagtcccgccacttccagatagactacgatgaggacgggaactgctctttaattattagtgatgtttgcggggatgacgatgccaagtacacctgcaaggctgtcaacagtcttggagaagccacctgcacagcagagctcattgtggaaacgatggagatatgggagttttcactatgttgcaaatgccaacaccagttctgtgaatcagaagctaaacctggaaccatggcaacatgaggaagctgaagctccaggatccnttgagcgcacactaaagtggtccggatgccatctggcttttagcagaggtatataaaagtccttctgaanggaagcatcccaatgtangcccctgnaattncn

SEQ ID NO: 434 - DNA, 882 bp, human
  misc_feature (730)..(730): n is a, c, g, or t
atagagaattactatgagaggatgcatcaccatcaccatcacggatcctatttaggtgacactatagaatcgtcgactctggaccttggctgtcactcagttggaacaccatctaatctgggaaaaggcagaagggctgcagctgctgcagaccttgctaatcgaagtggggaatcgaatactcaccaagacattgaagaaaaagatcggttattgcgtcatgtggaagccagagatctgattgagtttggcatgattcctgagtttgtgggacggttgcctgtggtggttccattgcatagcctagatgagaaaacacttgtacaaatattaactgagccacgaaatgctgttattcctcagtaccaggccttattcagcatggataagtgtgaactgaatgttactgaggatgctttgaaagctatagccagattggcactagaacgaaaaacaggtgcacgaggccttcggtccataatggaaaagctgttactagaaccaatgtttgaagtccctaattctgatatcgtatgtgtggaggttgacaaagaagtagtagaaggaaaaaaggaaccaggatacatccgggctccaacaaaagaatcctctgaagaggagtatgactctggagttgaagaagaaggatggccccgccaagcagatgctgcaaacagctaaactgtcatattgctgtcttgtatatacagcttttccttcttttgtttangatcatatttgtctctacagtctgatattaaaagcattggatctatcttgaaatcatacatgttcagagaacctttaagagaagatcagatcatgatataatcgtacatcacattgattttcggagatgttaatggacttaatgaaccatgt

SEQ ID NO: 435 - DNA, 885 bp, human
  misc_feature (780)..(780): n is a, c, g, or t
  misc_feature (791)..(792): n is a, c, g, or t
  misc_feature (797)..(797): n is a, c, g, or t
  misc_feature (823)..(823): n is a, c, g, or t
  misc_feature (828)..(829): n is a, c, g, or t
  misc_feature (869)..(869): n is a, c, g, or t
tagagaaatactatgagaggatgcatcaccatcaccatcacggatcctatttaggtgacactatagaatcgtcgactctggaccttggctgtcactcagtttcaaaagctgcacttcctgatttaactaaagtgattcaattgaagatggacttcactgcagcaagattacagagaggtcacttattactcaaacaaggaaaacttgatgaagcagaagatgattttaaaaaagtgctcaaatctaatccaagtgaaaatgaagaaaaggaagcacagtctcaacttataaaatctgatgaaatgcagcgtttgcgttcacaagcacttaacgcttttggaagtggagattatactgctgctatagccttccttgataagattttagaggtttgtgtttgggatgcagaactacgggaacttcgagctgaatgttttataaaagaaggagaacctaggaaagctataagtgacttaaaagctgcgtcaaagttgaagaatgataatactgaagcgttttataaaataagcacactgtactaccaactaggagaccacgaactgtccctcagtgaagttcgggaatgtcttaaacttgaccaggatcataaaaggtgttttgcacactataaacaagtaaagaaacttaataagctgattgagtcagctgaagagctcatcagagatggcagatacacagatgctaccagcaaatatgaatctgtcatgaaaacagagccaagcattgctgaatatacagttcgtttcaaggagaagattngccactgcttnntctangacgagaagccctgtgaaagctatanggttnngtctgaagtttacagatggacctgacatgtgatgccctgnagatcgagcaaagcta

SEQ ID NO: 436 - DNA, 838 bp, human
aactatagagagaatactatgagaggatgcatcaccatcaccatcacggatcctatttaggtgacactatagaatcgtcgactctggaccttggctgtcactcagttaaaagactatttgaggaaaaagcagatatgattatctatgttgtggacaatggacaatctgtgcacttccagacaatatttgctgctgctcaaatgattggttggtatgaccctaaagtaactcgagtcttccatgctggatttggtgtggtgctaggggaagacaagaaaaagtttaaaacacgttcgggtgaaacagtgcgcctcatggatcttctgggagaaggactaaaacgatccatggacaagttgaaggaaaaagaaagagacaaggtcttaactgcagaggaattgaatgctgctcagacatccgttgcgtatggctgcatcaaatatgctgacctttcccataaccggttgaatgactacatcttctcctttgacaaaatgctagatgacagaggaaatacagctgcttacttgttgtatgccttcactagaatcaggtctattgcacgtctggccaatattgatgaagaaatgctccaaaaagctgctcgagaaaccaagattcttttggatcatgagaaggaatggaaactaggccggtgcattttacggttccctgagattctgcaaaagattttagatgacttatttctccacactctctgtgaatatatatatgagctggcaactgctttcacagagttctatgatagctgctactgtgtggagaaagatagacagactggaaaaatattgaagggtgacatgtggcgtatgctgct

SEQ ID NO: 437 - DNA, 788 bp, human
  misc_feature (723)..(723): n is a, c, g, or t
ctatagagaaatactatgagaggatgcatcccatcaccatcacggatcctatttaggtgacactatagaatcgtcgactctggaccttggctgtcactcagttactggagagaaaccatatacatgtaaacagtgtgggaaagccttcagtgtttccagttcccttcgaagacatgaaaccactcacagtgcagagaaaccctatgagtgtaagcaatgcgggaaaacatttcatcatcttggaagctttcagatacacatgaaaaggcacactggagatcgacctcataaatgtaagatatgtgggaaaggctttgatcgtcccagtttagttcgatatcatgaacgaattcacactggagagaaaccctatgaatgcaagcagtgtgggaaaacgttatctcatagctcaagctttcgaagacacatgataatgcacactggaggtggacctcataaatgcaagatatgtgggaaagcttttgtttatcctagtgtatgtcaaagacacgaaaagtctcacagtggagagaaaccctatgaatgcaagcagtgtgggaaagcgttatctcatagctcaagctttcgaagacatatggtaatgcatacgggagatgggccgaataaatgcaaggtatgtgggaaagcctttgtttatcccagtgtatgtcaaagacatgaaaagactcactggagagaaacaatatgaatggtaactattantaagccttctatatttccagttccctttgatatcatgaataaacttacactggacagaaacccct

SEQ ID NO: 438 - DNA, 897 bp, human
  misc_feature (674)..(674): n is a, c, g, or t
  misc_feature (688)..(688): n is a, c, g, or t
  misc_feature (791)..(791): n is a, c, g, or t
  misc_feature (794)..(795): n is a, c, g, or t
  misc_feature (890)..(890): n is a, c, g, or t
  misc_feature (896)..(897): n is a, c, g, or t
agatactatgagaggacgcatcaccatcaccatcacggatcctatttaggtgacactatagaatcgtcgactctggaccttggctgtcactcagttaaagaggtgatgtttttaggagaaattgaagaaatcttagatgtcattgaaccaacacagttcaaaaaaattgaagagccacttttcaagcagatatccaagtgtgtatccagttctcattttcaggttgcagaaagggcattgtacttctggaataacgaatatattcttagtttgattgaggagaacattgataaaattctgccaattatgtttgccagtttgtacaaaatttccaaagaacactggaatccgaccattgtagcactggtatacaatgtgctgaaaaccctaatggaaatgaatggcaagcttttcgatgaccttactagctcatacaaagctgaaagacagagagagaaaaagaaggaattggaacgtgaagaattatggaaaaaattagaggagctaaagctaaagaaagctctagaaaaacagaatagtgcttacaacatgcacagtattctcagcaatacaagtgccgaataaaaaaaaagcctcccacctctgccggataggcagagttttgtatgcttttttgaaatatgtaaaaattacaaaaacaacctcatcagtantatataaattaaanggccattttttctggcaactggtaatgggaaaatatatggactaaacgtagccctgtgctgtatcatggccatagtatattgtaaccccttgtctatcatggnatnntatgtgtcactctgaagttcccagaaaggaatgattttatcatctatgatagagtgaaataatatgggagtgtaagaatatgactgaaaatctcntgatgnn

SEQ ID NO: 439 - DNA, 548 bp, human
agagatactatgagaggtcgcatcaccatcaccatcacggatcctatttaggtgacactatagaatcgtcgactctggaccttggctgtcactcagttaaaatggaacaggaaaagcacaatcaacagtctgaatttactgttgaaagcttgatagccactgtaactgatatgtttggggctggaacagagacaacgagcaccactctgagatatggactcctgctcctgctgaagtacccagaggtcacagctaaagtccaggaagagattgaatgtgtagttggcagaaaccggagcccctgtatgcaggacaggagtcacatgccctacacagatgctgtggtgcacgagatccagagatacattgacctcctccccaccaacctgccccatgcagtgacctgtgatgttaaattcaaaaactacctcatccccaaggttggattcatctctgatgaagagttcccccacgtgttttaactaaaagaaacatatagcatttctgtgatcaacccctcaataaattttagtgtacttgttgatatc

SEQ ID NO: 440 - DNA, 599 bp, human
  misc_feature (4)..(4): n is a, c, g, or t
  misc_feature (12)..(12): n is a, c, g, or t
  misc_feature (32)..(33): n is a, c, g, or t
  misc_feature (74)..(74): n is a, c, g, or t
  misc_feature (91)..(91): n is a, c, g, or t
  misc_feature (94)..(94): n is a, c, g, or t
  misc_feature (147)..(151): n is a, c, g, or t
  misc_feature (159)..(159): n is a, c, g, or t
  misc_feature (162)..(162): n is a, c, g, or t
  misc_feature (173)..(173): n is a, c, g, or t
  misc_feature (186)..(186): n is a, c, g, or t
  misc_feature (252)..(252): n is a, c, g, or t
  misc_feature (265)..(266): n is a, c, g, or t
  misc_feature (275)..(275): n is a, c, g, or t
  misc_feature (310)..(313): n is a, c, g, or t
  misc_feature (325)..(325): n is a, c, g, or t
  misc_feature (331)..(331): n is a, c, g, or t
  misc_feature (381)..(381): n is a, c, g, or t
  misc_feature (383)..(384): n is a, c, g, or t
  misc_feature (386)..(387): n is a, c, g, or t
  misc_feature (476)..(476): n is a, c, g, or t
  misc_feature (514)..(514): n is a, c, g, or t
  misc_feature (527)..(527): n is a, c, g, or t
cttncaaacccnaattctttgggccccaaaannttacctatgagaggatcgcatcaccataaccatcacggatnctatttaggggacactntanaatcgtcgacccacgcgtccgcaacaccacgatcaccagctatctggtccagnnnnnttacttcnccnaccaatacatnacagaatactttntctccaagtgcatttgattatgacacagaaaatatgaactctgaagatatttatagctctcttagnggggtcactgaannttttttttntttcagcttccgtagccaagaagatatgaatgagnnnntgaaaagggatncccccnaaagatgatggcgattcaatgtgtggtggtcctgggatgtctgacccaanannannaagagatgctactgactcaagtcaaacagctcttgataataaagcttcattgctccattcaatgcctactcactcctctccacgctctngagactataatccatataactattcagatagcatcagncccttcaacaagnctgccctcaaggaagccatgtttgatgatgatgctgaccagtttcctgacgatctttccctagatcattctg

SEQ ID NO: 441 - DNA, 718 bp, human
ttttttattctggaattaacctataaaaataggcgtatcacgaggccctttcgtcttcacctcgagaaatcataaaaaatttatttgctttgtgagcggataacaattataatagattcaattgtgagcggataacaatttcacacagaattcattaaagaggagaaattaactatgagaggatcgcatcaccatcaccatcacggtcgacccacgcgtccgcggccgccctcgcggccggccctcggccgcggggtggaccaagctttgccgcaagaacgccgggctcctgtcactccttcctccgcctctcgctaccaccgccgacggtcttcagggtcacgagatgagcgctatcggtcagacgtccacacggaagctgtccaggcggctctggccaaacacaaagagcggaagatggcagtgcctatgccttccaaacgcaggtccctggtcgtgcagacctcgatggacgcctacacccctccagatacctcttctggctcagaagatgaaggctcagtgcagggggactcccagggcacccccacctccagccagggcagcatcaatatggagcactggatcagccaggccatccacggctccaccacgtccaccacctcctcgtcctctacgcagagcgggggcagcggggctgcccacaggctggcggacgtcatggctcagacccacatagaaaatcattctgcacctc

SEQ ID NO: 442 - DNA, 1306 bp, human
  misc_feature (684)..(684): n is a, c, g, or t
  misc_feature (686)..(686): n is a, c, g, or t
atatactgaattacctataaataggcgtatccgaggccctttcgtcttcacctcgagaaatcataaaaaatttatttgctttgtgagcggataacaattataatagattcaattgtgagcggataacaatttcacacagaattcattaaagaggagaaattaactatgagaggatcgcatcaccatcaccatcacggtcgacccacgcgtccgcccacgcgtccggaaccaggcacggtccccttcgacagagtcctgctcaatgatggaggctattatgatccagagacaggcgtgttcacagcgccactggctggacgctacttgctgagcgcggtgctgactgggcaccggcacgagaaagtggaggccgtgctgtcccgctccaaccagggcgtggcccgcgtagactccggtggctacgagcctgagggcctggagaataagccggtggccgagagccagcccagcccgggcaccctgggcgtcttcagcctcatcctgccgctgcaggccggggacacggtctgcgtcgacctggtcatggggcagctggcgcactcggaggagccgctcaccatcttcagcggggccctgctctatggggacccagagcttgaacacgcgtagactggggtcccgcccgacgtgtctacgtcggctgaaaagacagcgggggcggcngnctcctggggctccccctgagaacgcgccacacaccactgaatgaccgccccacacctggcccaaacgtaatccctcccacacaacagcctcctacctaactccagctaacacacaaataaaagaccccacctaccacaccgaaaatccaccatccactaaccccaagacaccataacaccactcaacccaccatgccgcaccaacattgaaaaaaacgacccccacaccgcacacctcacagcccatccgacacacccgcacaccctccggcccaccaacatcacaacagaacacaatacacactcacaacaatccactccacgaccacaacaatcccaaacccagcaccattacaatacggactactaatgcactcaccctaacaactactgcatattaccccccagacaaacaacaacacataacacgcacactactgcaccaactccacccaccattctgacacctctccgctttacggacgtatcgcccacccctcacactcacacaggcccagaagagccgcctgaaatgaactagtagccaccaccttcaccataggagacccaatctgcaccctataaactaatcggcacataccctaccaccgtacacctca

SEQ ID NO: 443 - DNA, 1395 bp, human
gatatactgacttacctataaataggcgtatcacgaggccctttcgtcttcacctcgagaaatcataaaaaatttatttgctttgtgagcggataacaattataatagattcaattgtgagcggataacaatttcacacagaattcattaaagaggagaaattaactatgagaggatcgcatcaccatcaccatcacggtcgacccacgcgtccgactgtgttggatgagaacaagaacacggccctccacttggcttgtagcaagggccatgagaaatgtgccctcatgatcctggcagaaacccaagaccttggccttatcaatgctaccaacagtgcgctgcagatgccactccacattgctgcccggaatggtctagcttctgtggtacaggccctgctgagtcatggggccacagtgctggctgtggatgaagaaggtcacaccccagcactggcctgtgcccccaacaaagatgtggcagactgcctggccttgatcctttccaccatgaagcctttcccacccaaggacgccgtcagatctatcaacattcccccactaaatacattgaaccatcaatcaccaacacgttgacacatccaccactcccagacatgcaaaccgctctgcctagcgcgactccacaactaataaaccaatacacacaaaaccccctccaacacacccgtccattccctaacttataaaacccccaccaacaaaactaaccatctactcaccctcacactcacaccatcaccatacatactccgcctaactacctccaccttctaccttcaataaaaaaaaccctccaatcacacgaaccaccaaacaacacaccgactcatcctacattaatcccaccacctaacagctaacctatcaccaaaccgcactatcaatacaactacactacatctccaacttcaccccaccaactctcttcacaccacacgaaatcgacaccaatcttccaaccaaatcccacatacactacatccccctatactcaccctctcaaaaatactataccaacaccccccacaccctaacctattacccaccataactcccccctccccacgatatcacacccatctaccaccaccccataatctccaaccacctacgcctctcccctaccacccataccttaatttacaaacacatacacctcaacaatatagaacaccaaccagcagtcccttcaaaccaccatcacatatatatccctaccacacacttcacctctcactatcttgacaacaacattcattgctctacaccaactccaatcgaaaatctacgccacaatcacctattaactcgccatacaacattcgtaccctacatactatgagctactgctactactacacacatgaag

SEQ ID NO: 444 - DNA, 1322 bp, human
  misc_feature (21)..(21): n is a, c, g, or t
  misc_feature (23)..(23): n is a, c, g, or t
taaaatgcaggtgagactatnanagacgcatcaccatcaccatcacggtcgacccacgcgtccggaagaacagagatcttttgagttggctgcaatggaagaaacccggatagtcattttgaacaacctcgaggaacttaagcaaaaaatcaaagacataaatgatcagatggatgagtctttcagagagttggatatggaatgtgctcttttggatggagaacagaaatctgaaacaactgaacttatgaaggagaaggagattttggatcatctaaaccggaaaatagctgaactggaaaagaacattgttggtgaaaagaccaaggagaaggtaaagcttgatgctgaaagggaaaaactagagaggcttcaggagctttactccgagcagaagacccagctggacaattgtcctgagtccatgagggaacagttacaacaacaactgaagagggatgctgacctgctggatgttgaaagcaaacactttgaagacctggagttccagcagcttgaacatgagagccgtctagatgaagaaaaggagaacttgactcaacagctcctgcgtgaaagtgctgaatatcaacggaacatcgtttctagaaagaaaaaaatttctgcattgaaaaacaagcccatcacattgttcaacaggcttaaaaaaaccaaaaacattttggggaaaaaaagaataatttaaaaaggatgttgcaaagagaaaagagaatcttttgaaatttggaaaaaaaaaaccccgccccctcgggggggaaaggggtcccccgtaacccccaaacttaaaaaaaattccccgccgaaacctaacccctgtgccactgaacctccccaaactggggttggggaacccccccccaaaagaaaaaaacccctttaaaaatttggaaaaaaagaaaaaaaccccttaaaaaaggccccccccccgggggaaattttccccccaaaaaaaaaaacatttttcccttccccccatttttccagggggttaattgggggagaaaatcctccccaagggcctctcttctccagaaaaaaaaaaaacttggggggaggggctcccccccccccgggggggcggggcgaaatctaaaatattccgggggcctcccgagttttcccccccccacagaggggggcgccccccgcaaaaaatttttttttttcttcccgcccccgtaacaaacaaaccaacaaaaaatctctttttcaaaaaaacccccaagagaggcgtcttttatttttgccgcccaatttttttagagggaagacatctttttcgttccctacaaaaaattttc

SEQ ID NO: 445 - DNA, 1367 bp, human
  misc_feature (703)..(704): n is a, c, g, or t
  misc_feature (709)..(709): n is a, c, g, or t
  misc_feature (720)..(720): n is a, c, g, or t
  misc_feature (750)..(750): n is a, c, g, or t
  misc_feature (856)..(858): n is a, c, g, or t
  misc_feature (863)..(863): n is a, c, g, or t
  misc_feature (948)..(948): n is a, c, g, or t
  misc_feature (956)..(956): n is a, c, g, or t
  misc_feature (959)..(959): n is a, c, g, or t
  misc_feature (966)..(966): n is a, c, g, or t
  misc_feature (974)..(977): n is a, c, g, or t
  misc_feature (994)..(994): n is a, c, g, or t
  misc_feature (1092)..(1092): n is a, c, g, or t
  misc_feature (1172)..(1172): n is a, c, g, or t
  misc_feature (1192)..(1192): n is a, c, g, or t
  misc_feature (1220)..(1220): n is a, c, g, or t
  misc_feature (1227)..(1227): n is a, c, g, or t
  misc_feature (1248)..(1248): n is a, c, g, or t
  misc_feature (1280)..(1280): n is a, c, g, or t
cctgagagatactagagaggtcgcatcaccatcaccatcacggtcgacccacgcgtccgcacatgcaaactcaagatggagaaaaattctatgaatgtaaagcatgtgggaaacccttcactgagtcgtcatatcttactcaacatttaagaactcatagtagagtgttacctatagaacataagaaatttggcaaagcctttgctttttccccagatcttgctaaacatataagacttagaactagaggaaaacactatgtttgtaatgaatgtggcaaagaatttacttgtttctcaaaactcaacattcacataagggttcacactggagaaaaaccgtatgagtgcaacaaatgtgggaaagccttcactgattcatcaggtcttataaaacacaggcgaactcacactggagaaaagccttatgaatgtaaggaatgtgggaaagcttttgctaactcttcacatcttactgtacatatgagaactcacactggtgagaagccttatcaatgtaaggaatgtggaaaagcctttattaattcctcttcctttaaaagtcacatgcagactcatcctggtgtaaaaccctatgactgtcaacagtgtgggaaagccttcattcgatcctcatttcttattcgacatttgagaagtcacagtgcagaaaggccttttgaatgtgaggaatgtgggaaagnntttanatactcctcgnaccttaatcaacataaaacaatacataccngggtagagcccataaaactgtcacaagggtgggcaagccttcaacatttcctccatgcctccccgtaacctcatacccccactcgtctccttgccttttgaatgtnnncctgnccccccctcttttctcctctttccaaaattccccccttctccttttcctcccacccccattccatctttattacctcccttaccnttttttantcnctccccnctcccttnnnnccctcccaacctccttnctcctcttcttcccaatcctttattcctcccctcttctttaatcacactcctctcctcccccatctccctaccacccctcaattctcttctcccccanttatttccatcttcactacacatccaccctctctcccccctccatccccctctttcccttcctatccttctcctttttcntacctaactcttaccacctnttttatcccaccccctctaccccctacnttcccanctaaccatcacatctatcttntctactaccctctccttccctattcacccctnttcttaactacctcctccaaccatcttctctccttcttctccccccatctcattcttaccttcattccctccttactccattcccct

SEQ ID NO: 446 - DNA, 954 bp, human
  misc_feature (845)..(845): n is a, c, g, or t
  misc_feature (867)..(867): n is a, c, g, or t
  misc_feature (890)..(890): n is a, c, g, or t
  misc_feature (897)..(897): n is a, c, g, or t
  misc_feature (910)..(910): n is a, c, g, or t
  misc_feature (928)..(928): n is a, c, g, or t
  misc_feature (937)..(937): n is a, c, g, or t
  misc_feature (939)..(939): n is a, c, g, or t
  misc_feature (942)..(942): n is a, c, g, or t
ctaaggatactagagaggatgcatcaccatcaccatcacggtcgacccacgcgtccgggccgccaaaccccagctggaactccggccacagccagcatgcagggcgaagagagcctccggatcctggtggagcccgaaggggacagcttcccgctgatggagatcagcacctgtgagaccgaggcctccgagcagtgggactatgtcctcgtggcccaacgtcacacccagagagacccccggcaggcgcggcagcaacagttcctggaggagctcaggagaaagggcttccacattaaggtgatccgggaccagaaacaggtcttctttgggatccgtgctgacaacagtgtctttggcctgtaccgcactctcctcctggagcctgaggggcctgccccccacgccgagctggccgcgccgaccaccatcccggtcaccacgagaatccgaatcgtgaacttcgttgtcatgaacaacaagacctcggctggtgagaccttcgaggatctgatgaaaggacggggtctttgaggccaggttccccctgcacaaggtgaggggtgggctggcctggagagggccctggggtgggaccctgggatgggggctctcactctctgtcacccgagccagggggagggacgcctgaagaagacgtgggcgcggtggagacacatgttccgggagcagccagttgatgaaatcaggaactactttggggaaaaggtggccctgtacttcgtctggctgggctggtacccctacttgctggtgcccgccgccctgacgggcctcttagtctttctgagcggattctcgctggttgaagcccgccaaatcancaaggagatctgtgaggccccnacatcctcatgggtcccttcggngaccaancccgcaggaccancggttctccgaaacctgnttttttgcnantcncccccccttttt

SEQ ID NO: 447 - DNA, 1290 bp, human
  misc_feature (11)..(12): n is a, c, g, or t
  misc_feature (1247)..(1247): n is a, c, g, or t
ggcattttttnnaacaggtagactagagaggatcgcatcaccatcaccatcacggtcgacccacgcgtccggaacaaatcgtgacatggcttatatctttgggagttttagagtcccctaaaaagaccatctgtgatccggaggagtttttaaagtcctcgctgaaaaatggggtagttctgtgcaaactgatcaacagactcatgcctggctctgtggaaaagttttgtctggatccccaaactgaagctgactgcatcaacaacatcaatgacttcctgaaaggatgtgcaaccctccaagtggaaatatttgatcctgatgacctttattcaggggtcaatttctccaaggtactgagtactcttttagctgtcaacaaagcaacagaagatcagctatcagaaagaccatgtggacgttcctcttctcttagtgctgctaatacttctcagacaaacccacagggagcagtttctagcacagtttcagggctgcaaaggcagtcaaagacagtggagatgacggaaaatggaagtcatcagttgatagtaaaagcaagatttcactttaagcagactaatgaggatgaactgtcagtttgtaaagggggactccttttacgtcccacaatttgaaaaaggagctggtgggaaaggcccataaatgggaaaaccgggtgttccccaaaaatatggcccggaattaaaacccggggagggagttccccctttttcccccgcttggaagaaaaagggggaaattatttcacccaaaaccttgcttctccgggttaaaaaaaaaccctcccccccaaaccccccaaaagattaaaaacccccccctcaaaaaaaaataataataggggggggctaaaaaaaacctcccgacccgaaaaaaaaattttctaaaaaaatcccccccctccctttgtcctatttaaaaacccccccgcccacaaaaacactgaaccgccgggggggggaactcttctctcgcgccacacctccacaaaaaataccctttttcacaacccacccctccaccaccctcaataagaactctacatcttcccaacaaaacccaaaacacacgtggggtgacctctccaccccccccctcccctatataacaaactacccatgttccacccacccaacaaaacccccatcccactttacaatcacactccacctaacatcccataatttataatctatctacataacacgaagacccacacgcancgcccctccccttcattttcatctacatcctaaccatacacaa

SEQ ID NO: 448 - DNA, 1289 bp, human
  misc_feature (1148)..(1148): n is a, c, g, or t
  misc_feature (1151)..(1152): n is a, c, g, or t
  misc_feature (1163)..(1163): n is a, c, g, or t
  misc_feature (1182)..(1182): n is a, c, g, or t
  misc_feature (1214)..(1215): n is a, c, g, or t
  misc_feature (1220)..(1220): n is a, c, g, or t
  misc_feature (1222)..(1224): n is a, c, g, or t
  misc_feature (1231)..(1231): n is a, c, g, or t
  misc_feature (1233)..(1233): n is a, c, g, or t
  misc_feature (1262)..(1262): n is a, c, g, or t
  misc_feature (1267)..(1268): n is a, c, g, or t
  misc_feature (1271)..(1271): n is a, c, g, or t
ccgcgcccacgcccaagagatactagagaggatgcatcaccatcaccatcacggtcgacccacgcgtccgcgctccttccccacgctgccaaccctcacggagagccgcttcccagaccccaggatgcattatcccggggccatgtcagctgccttcccctacagcgccacgccctcgggcacgagcatcagcagcctcagcgtggcgggcatgccggccaccagccgcttccaccatacctacctcccgccaccctacccgggggccccgcagaaccagagcgggcccttccaggccaacccgtccccctaccacctctactacgggacatcctctggctcctaccagttctccatggtggccggcagcagcagtgggggcgaccgctcacctacccgcatgctggcctcttgcaccagcagcgctgcctctgtcgccgccggcaacctcatgaaccccagcctgggcggccagagtgatggcgtggaggccgacggcagccacagcaactcacccacggccctgagcacgccaggccgcatggatgaggccgtgtggcggccctactgaccgccctggtggactcctcccgctggaggcggggaccctaacaaccttcaagaccagtgatgggccggctccgaggctccgggcgggaatgggacctgcgctccagggtggtctcggtcccagggtggtcccagctggtgggagcctctggctgcatctgtgcagccacatccttgtacagaggcataagttaccacccccaccccggcccgggatactgcccccgggccagatcctgggcgtctcatcccatacttcggtgggggaaccgcctcctgccaaccccccggaaggactccctgcctccacttagcccaatggcggttggaacccaggctcctgggacaaaggcatctctcttccaaaaagaggaacatggcccaagggaaaaccccaggccctggaaaccccccgaaccgggacctttcgtggaacccctgatccccgggtcaagcccctctgattaacaagaattggtcaaaacggaaaggtccccccccccaccaccctgaaggggtcccccctgtaaaaagggggagacccacacctgtgggaaaaaaggtttgaaaaaataaancgnnccccaggcagnttcccccgataaaaggggntttccccaccgaggtcccgccccaaaaaaagnntttgntnnnattttancngaaaagaataagaggtcccctgggttatntaagnnacnctgtttttgtgggggggg

SEQ ID NO: 449 - DNA, 782 bp, human
cccgcaaaaccccccctaagagatactagagaggatcgcatcaccatcaccatcacggtcgacccacgcgtccggcagactcaactatcatggacattcaggtcccgacacgagccccagatgcagtctacacagaactccagcccacctctccgaccccaacctggcctgctgatgaaacaccacaaccccagacccagacccagcaactggaaggaacggatgggcctctagtgacagatccagagacacacaagagcaccaaagcagctcatcccactgatgacaccacgacgctctctgagagaccatccccaagcacagacgtccagacagacccccagaccctcaagccatctggttttcatgaggatgaccccttcttctatgatgaacacaccctccggaaacgggggctgttggtcgcagctgtgctgttcatcacaggcatcatcatcctcaccagtggcaagtgcaggcagctgtcccggttatgccggaatcattgcaggtgagtccatcagaaacaggagctgacaacctgctgggcacccgaagaccaagccccctgccagctcaccgtgcccagcctcctgcatcccctcgaagagcctggccagagagggaagacacagatgatgaagctggagccagggctgccggtccgagtctcctacctcccccaaccctgcccgcccctgaaggctacctggcgccttgggggctgtccctcaagttatctcctctgctaagacaaaaagtaaagcactgtggtctttgcc

SEQ ID NO: 450 - DNA, 1384 bp, human
  misc_feature (770)..(771): n is a, c, g, or t
  misc_feature (804)..(804): n is a, c, g, or t
  misc_feature (856)..(856): n is a, c, g, or t
  misc_feature (873)..(873): n is a, c, g, or t
  misc_feature (945)..(945): n is a, c, g, or t
  misc_feature (1359)..(1359): n is a, c, g, or t
  misc_feature (1374)..(1375): n is a, c, g, or t
  misc_feature (1381)..(1381): n is a, c, g, or t
ctaagagatactagagaggatcgcatcaccatcaccatcacggtcgacccacgcgtccggacctgaaaaagggcaagagaacccagagcaatgacaccagtctggactctggggtggacatgaatgagcttcactcaagtagaaagctcgagagggagaaaacattcatcaaaagcatgcatcagcccaagatcctttacttagaagatttagacctaagcagcagtgagagtggaaccaccgtctgttcccctgaggacccagctttaaggcacatcctagatggagggagtggagtgatcatggagcaccctggagaagagtcgccaggaaggaaaagcactgttgaagattttgaagctaatacatcccccactaaaagaaggggcagaccaccactagccaaaagagatagcaagactaacatctggaagaagcgagaggaacgcccactgattcccataaattaactccaatggggattgtgtgtctgctgtctcgtgctgtttattcttgcttcttgttgtaaattgcagtacgaacttaagaaaatgagactgagcaatctcatggttcttggacatgtctcaagcagagtaaatggtaattcagtaatcagagagaaagataccaaggaatgctttttctggcctattcatttatttttgggtgatgaatttacagtatctaagttttcaaaatgtaaaatagcttcaagatgttagttatctgaaaatgttgctcagccagccagtttggccttgactctnnctagaataacagtgaaatatatactcctcaagntgcctccaaaaatgttgcctctaccatggtgactaccccatggaacatttanaaacaaactgacttcangcatcatataatttttaaatgtactattacgtcttcttctgccaaactaaaaataacttgataatgactggnactgaggtactccggaattatcacaaaaaaatggtggttggccttaaaaccatggggatggatcctcccaacggaaatccaacttaaaaaaaagggcaaaaacccattggccttaaaagggaaacccccccctggggggtttgggaaaacctcccaaaagagaaggttttttaaaattggaaaaagggcccaacgggtttttttaaaaaattttttctcccccaaaaagagagtttgtggggggaattttttaattgaaaaaaccatgttttttgggccccgcgcttttggcaggtgttaaattttttttaaaaacgaggcgccttggggagatataaaaggggagagtttttccaaaaatgaggacaaatttttttcttgataaaaaaaaattcttgtcaatccgagattttnttttatgagagaaanntaaaanccc

SEQ ID NO: 451 - DNA, 843 bp, human
  misc_feature (733)..(734): n is a, c, g, or t
  misc_feature (742)..(742): n is a, c, g, or t
  misc_feature (786)..(786): n is a, c, g, or t
  misc_feature (810)..(810): n is a, c, g, or t
  misc_feature (821)..(824): n is a, c, g, or t
  misc_feature (826)..(832): n is a, c, g, or t
  misc_feature (834)..(837): n is a, c, g, or t
  misc_feature (841)..(843): n is a, c, g, or t
ggatatactgacttacctataaataggcgtatcacgaggccctttcgtcttccctcgagaaatcataaaaaatttatttgctttgtgagcggataacaattataatagattcaattgtgagcggataacaatttcacacagaattcattaaagaggagaaattaactatgagaggatcgcatcaccatcaccatcacggtcgacccacgcgtccggagggctcggaggagaaggggcccgaggtgcgtgagtaccgggagaaggtggagactgagctccagggcgtgtgcgacaccgtgctgggcctgctggacagccacctcatcaaggaggccggggacgccgagagccgggtcttctacctgaagatgaagggtgactactaccgctacctggccgaggtggccaccggtgacgacaagaagcgcatcattgactcagcccggtcagcctaccaggaggccatggacatcagcaagaaggagatgccgcccaccaaccccatccgcctgggcctggccctgaacttttccgtcttccactacgagatcgccaacagccccgaggaggccatctctctggccaagaccactttcgacgaggccatggctgatctgcacaccctcagcgaggactcctacaaagacagcaccctcatcatgcagctgctgcgagacaacctgacactgtggacggccgacaacgccggggaagaagggggcgaggctccccnngagccccnaagctgaggggggcccgccaccgccccgcccgggcccccccagncccccaccccgccaagaggacaanaaggggggggnnnncnnnnnnncnnnncccnnn

SEQ ID NO: 452 - DNA, 714 bp, human
atggagacccgggggcctcagggagctgcgaatcccatggactcctcccgcagcctgggggacctcgggccttttccgcgggaggtagggcgcggggctccgctagctccgggcgcccggaatcccgcgacggcaggggcgagccgaagccagggcggcggccacgaggacagaacggcagatcgggccctcggacctcgggccggggaggaattggaccgtgagtcctgggtcagagagaaagtgctctttctcctgcacccagagaggtggttagggactcgaggggaccctgcacgggaagaggtggccggtgcagaggaccttcctcatgcgggtggagaggaccacggcgaggagcccaactacccttctgtctttcaacgagaaaagcgaatttctggcaggcgtgtagccccgccgcgggacgcagcagacccacccaaatacgtgcttgtgcgggtggaggattatcaggtaacacaagaagtgttgcagacctcctgggccaagggtcgcatgaccacgaggactgaggagcacttcgtgaccgcgctcacttttcgcagcagtagagagggacagcctggggaacgctggggccctgctgaatcccgggctctccaggcacgaacaggggcatcccgcgtccacgccgcggggaggagggtttcaccgtctccagggacttggctcgaggaaattaaactctaa

SEQ ID NO: 453 - DNA, 279 bp, human
atggctgtcttggctggatccctgttgggccccacgagtaggtcggcagcgttgctgggtggcaggtggctccagccccgggcctggctggggttcccagacgcctggggcctccccaccccgcagcaggcccggggcaaggctcgcgggaatgagtatcagccgagcaacatcaaacgcaagaacaagcacggctgggtccggcgcctgagcacgccggccggcgtgcaggtcatccttcgccgaatgctcaagggccgcaagtcgctgagccattga

SEQ ID NO: 454 - DNA, 921 bp, human
atggccagcaacgttaccaacaagacagatcctcgctccatgaactcccgtgtattcattgggaatctcaacactcttgtggtcaagaaatctgatgtggaggcaatcttttcgaagtatggcaaaattgtgggctgctctgttcataagggctttgccttcgttcagtatgttaatgagagaaatgcccgggctgctgtagcaggagaggatggcagaatgattgctggccaggttttagatattaacctggctgcagagccaaaagtgaaccgaggaaaagcaggtgtgaaacgatctgcagcggagatgtacgggtcagtaacagaacacccttctccgtcccctctactcagctcctcttttgacttggactatgactttcaacgggactattatgataggatgtacagttacccagcacgtgtacctcctcctcctcctattgctcgggctgtagtgccctcgaaacgtcagcgtgtatcaggaaacacttcacgaaggggcaaaagtggcttcaattctaagagtggacagcggggatcttccaagtctggaaagttgaaaggagatgaccttcaggccattaagaaggagctgacccagataaaacaaaaagtggattctctcctggaaaacctggaaaaaattgaaaaggaacagagcaaacaagcagtagagatgaagaatgataagtcagaagaggagcagagcagcagctccgtgaagaaagatgagactaatgtgaagatggagtctggggggggtgcagatgactctgctgaggagggggacctactggatgatgatgataatgaagatcggggggatgaccagctggagttgatcaaggatgatgaaaaagaggctgaggaaggagaggatgacagagacagcgccaatggcgaggatgactcttaa

SEQ ID NO: 455 - DNA, 306 bp, human
atggggtttgttaaagttgttaagaataaggcctactttaagagataccaagtgaaatttagaagacgacgagagggtaaaactgattattatgctcggaaacgcttggtgatacaagataaaaataaatacaacacacccaaatacaggatgatagttcgtgtgacaaacagagatatcatttgtcagattgcttatgcccgtatagagggggatatgatagtctgcgcagcgtatgcacacgaactgccaaaatatggtgtgaaggttggcctgacaaattatgctgcagccaagtggaggtga

SEQ ID NO: 456 - DNA, 324 bp, human
atggcccgcgctgctctctccgccgcccccagcaatccccggctcctgcgagtggcactgctgctcctgctcctggtagccgctggccggcgcgcagcaggagcgtccgtggccactgaactgcgctgccagtgcttgcagaccctgcagggaattcaccccaagaacatccaaagtgtgaacgtgaagtcccccggaccccactgcgcccaaaccgaagtcatagccacactcaagaatgggcggaaagcttgcctcaatcctgcatcccccatagttaagaaaatcatcgaaaagatgctgaacagtgacaaatccaactga

SEQ ID NO: 457 - DNA, 381 bp, human
atgtctattggtgtgccgattaaagtactgcatgaggccgagggccacattgtgacatgtgagacgaacaccggtgaggtatatcgggggaagctcattgaagcagaggacaacatgaactgccagatgtccaacatcacagtcacatacagagatggccgagtggcacagctggagcaggtatacatccgtggcagcaaaatccgctttctgattttgcctgacatgctgaagaacgcacccatgttaaagagcatgaaaaataaaaaccaaggctcaggggctggccgaggaaaagctgctattctcaaggcccaagtggccgcaagaggaagaggacgtggaatgggacgtggaaacatctttcaaaagcgaagataa

SEQ ID NO: 458 - DNA, 792 bp, human; identical to SEQ ID NO: 351
  misc_feature (749)..(749): n is a, c, g, or t
  misc_feature (791)..(792): n is a, c, g, or t

SEQ ID NO: 459 - DNA, 905 bp, human; identical to SEQ ID NO: 293
  misc_feature (873)..(873): n is a, c, g, or t
  misc_feature (903)..(903): n is a, c, g, or t

SEQ ID NO: 460 - DNA, 905 bp, human; identical to SEQ ID NO: 358

SEQ ID NO: 461 - DNA, 1268 bp, human; identical to SEQ ID NO: 315
  misc_feature (908)..(908): n is a, c, g, or t
  misc_feature (922)..(922): n is a, c, g, or t
  misc_feature (947)..(947): n is a, c, g, or t
  misc_feature (973)..(973): n is a, c, g, or t
  misc_feature (980)..(980): n is a, c, g, or t
  misc_feature (987)..(987): n is a, c, g, or t
  misc_feature (997)..(997): n is a, c, g, or t
  misc_feature (1010)..(1010): n is a, c, g, or t
  misc_feature (1016)..(1016): n is a, c, g, or t
  misc_feature (1021)..(1021): n is a, c, g, or t
  misc_feature (1023)..(1023): n is a, c, g, or t
  misc_feature (1040)..(1040): n is a, c, g, or t
  misc_feature (1051)..(1051): n is a, c, g, or t
  misc_feature (1056)..(1057): n is a, c, g, or t
  misc_feature (1079)..(1079): n is a, c, g, or t
  misc_feature (1101)..(1101): n is a, c, g, or t
  misc_feature (1114)..(1115): n is a, c, g, or t
  misc_feature (1127)..(1127): n is a, c, g, or t
  misc_feature (1129)..(1129): n is a, c, g, or t
  misc_feature (1139)..(1139): n is a, c, g, or t
  misc_feature (1142)..(1142): n is a, c, g, or t
  misc_feature (1155)..(1155): n is a, c, g, or t
  misc_feature (1157)..(1157): n is a, c, g, or t
  misc_feature (1161)..(1161): n is a, c, g, or t
  misc_feature (1168)..(1168): n is a, c, g, or t
  misc_feature (1191)..(1191): n is a, c, g, or t
  misc_feature (1194)..(1194): n is a, c, g, or t
  misc_feature (1197)..(1198): n is a, c, g, or t
  misc_feature (1200)..(1200): n is a, c, g, or t
  misc_feature (1203)..(1203): n is a, c, g, or t
  misc_feature (1207)..(1207): n is a, c, g, or t
  misc_feature (1211)..(1211): n is a, c, g, or t
  misc_feature (1215)..(1215): n is a, c, g, or t
  misc_feature (1220)..(1220): n is a, c, g, or t
  misc_feature (1226)..(1226): n is a, c, g, or t
  misc_feature (1231)..(1231): n is a, c, g, or t
  misc_feature (1237)..(1238): n is a, c, g, or t
  misc_feature (1249)..(1249): n is a, c, g, or t
  misc_feature (1258)..(1258): n is a, c, g, or t
  misc_feature (1264)..(1264): n is a, c, g, or t

SEQ ID NO: 462 - DNA, 877 bp, human; identical to SEQ ID NO: 328

SEQ ID NO: 463 - DNA, 1176 bp, human; identical to SEQ ID NO: 329
  misc_feature (742)..(742): n is a, c, g, or t
  misc_feature (759)..(759): n is a, c, g, or t
  misc_feature (813)..(813): n is a, c, g, or t
  misc_feature (833)..(833): n is a, c, g, or t
  misc_feature (840)..(841): n is a, c, g, or t
  misc_feature (853)..(853): n is a, c, g, or t
  misc_feature (859)..(859): n is a, c, g, or t
  misc_feature (861)..(861): n is a, c, g, or t
  misc_feature (891)..(891): n is a, c, g, or t
  misc_feature (907)..(908): n is a, c, g, or t
  misc_feature (910)..(910): n is a, c, g, or t
  misc_feature (914)..(914): n is a, c, g, or t
  misc_feature (936)..(936): n is a, c, g, or t
  misc_feature (941)..(943): n is a, c, g, or t
  misc_feature (951)..(951): n is a, c, g, or t
  misc_feature (962)..(962): n is a, c, g, or t
  misc_feature (971)..(971): n is a, c, g, or t
  misc_feature (974)..(974): n is a, c, g, or t
  misc_feature (983)..(984): n is a, c, g, or t
  misc_feature (992)..(992): n is a, c, g, or t
  misc_feature (994)..(994): n is a, c, g, or t
  misc_feature (1006)..(1006): n is a, c, g, or t
  misc_feature (1009)..(1009): n is a, c, g, or t
  misc_feature (1020)..(1020): n is a, c, g, or t
  misc_feature (1027)..(1027): n is a, c, g, or t
  misc_feature (1036)..(1036): n is a, c, g, or t
  misc_feature (1073)..(1074): n is a, c, g, or t
  misc_feature (1091)..(1091): n is a, c, g, or t
  misc_feature (1100)..(1100): n is a, c, g, or t
  misc_feature (1107)..(1107): n is a, c, g, or t
  misc_feature (1114)..(1114): n is a, c, g, or t
  misc_feature (1121)..(1121): n is a, c, g, or t
  misc_feature (1132)..(1132): n is a, c, g, or t
  misc_feature (1134)..(1134): n is a, c, g, or t
  misc_feature (1136)..(1136): n is a, c, g, or t
  misc_feature (1138)..(1138): n is a, c, g, or t
  misc_feature (1140)..(1140): n is a, c, g, or t
  misc_feature (1147)..(1148): n is a, c, g, or t
  misc_feature (1155)..(1155): n is a, c, g, or t
  misc_feature (1163)..(1163): n is a, c, g, or t
  misc_feature (1173)..(1173): n is a, c, g, or t
  misc_feature (1175)..(1175): n is a, c, g, or t

SEQ ID NO: 464 - DNA, 1362 bp, human
cctaggaatactagagaggacgcatcaccatcaccatcacggtcgacccacgcgtccgcttcccaacggctccctcttccttccggctgtcgggatccaggatgaggggattttccggtgccaggcaatgaacaggaatggaaaggagaccaagtccaactaccgagtccgtgtctaccagattcctgggaagccagaaattgtagattctgcctctgaactcacggctggtgttcccaataaggtggggacatgtgtgtcagagggaagctaccctgcagggactcttagctggcacttggatgggaagcccctggtgcctaatgagaagggagtatctgtgaaggaacagaccaggagacaccctgagacagggctcttcacactgcagtcggagctaatggtgaccccagcccggggaggagatccccgtcccaccttctcctgtagcttcagcccaggccttccccgacaccgggccttgcgcacagcccccatccagccccgtgtctgggagcctgtgcctctggaggaggtccaattggtggtggagccagaaggtggagcagtagctcctggtggaaccgtaaccctgacctgtgaagtccctgcccagccctctcctcaaatccactggatgaaggatggtgtgcccttgcccccttccccccagccctgtgctgatcctccctgatatatgttctccacgccccatgaccccccatgtcgagtcccccccccctccacccaccctttccttccatagctcccttgccaacaccatattcacctaaccactcgtgaccgcccttactatccccctagactttcttccccccccccgcaccccccctcttccctccacctctcttcatgcccccatatcccaccttctacccctttgctccccccacttcaactctctccccccctatcaccctccccccccaccccccccctcccatcccccccccctccatctcattactccccctaccccaatacatcctctcccctacatcccaccccctccactacccctccacccacaccgtttcccctcctcaacccttctcaaccacctcgcacatccccactcccctcacccaccctctcgacaaccctacttcctcaaccatcccctctctaagccctctccgacactccaccactaccttacctcccctctccacacccccctcactctccactccctctccaaatcttccaattatcactcccacctcccacccttacctccccataccccaacctccccttccctcataccctgccacccgtcttcattaaacccatatcaccatactaaccataatccctctccctcaaacgctccacctc

SEQ ID NO: 465 - DNA, 1686 bp, human
atggctgaccacaaccctgacagcgactccacgccgcgcacgctgctgcgacgcgtgctggatacagcggacccgcgcaccccgcggcgaccccggagtgctcgggctggagcccggagagccctgcttgaaacggcttcccccaggaagttgagtggccaaacaaggacgatagccagagggcgttcccatggagccaggtctgttggcagatcggcccatattcaggccagtgggcacttggaggaacagacacctcggacgctgctgaagaacatcctactaactgccccagaatcttccatcctgatgcctgagtcggtagtgaagccagtgccagcaccgcaggcggtccaaccctccagacaagagagcagttgcggcagcctggagctgcaacttcctgagctcgagccccccacaaccctggctccaggtctgctggcccctggcaggaggaaacagaggctgagactgtcagtgtttcagcagggagtggaccaggggctgtctctctcccaagagcctcaagggaatgctgatgcctcttccctcaccagatccctcaacctgacctttgccacacctcttcagccacagtcagtgcagaggcctggcttggcccgcagacctccagcccgccgagctgtagacgtgggtgcctttttgcgggatctgcgagatacttccctggctcctccaaacattgtgttggaggacacccagccgttctctcagcccatggttggctcccccaacgtgtatcactccctgccctgcacgcctcacactggggctgaagacgctgagcaggctgccggtcgcaagacacagagcagtgggcctgggctgcagaagaatagccctgggaaaccagcccagtttctggcaggagaggcagaggaggtcaatgcctttgctctgggcttcctgagcaccagcagtggtgtctctggagaagatgaagtagagcccttacacgatggagttgaagaggcagagaaaaagatggaagaagaaggtgtgagtgtgagtgaaatggaggcaacaggagcacaaggacccagcagggtagaagaggctgagggacacacagaggtgacagaagcagagggatcccaggggactgctgaggctgacgggccaggagcatcttcaggggatgaggatgcctctggcagggcagcaagtccagagtcggcctccagcacccctgagtctctccaggccaggcgacatcatcagtttcttgagccagccccagcgcctggtgctgcagtcttatcttcagagcctgcagagcctctgttggtcaggcatccccctaggccccggaccaccggccccaggccccggcaagatccccacaaggctggactgagccactatgtgaaactctttagcttctatgccaagatgcccatggagaggaaggctcttgagatggtggagaagtgcctagataaatatttccagcatctttgtgatgatctggaggtatttgctgctcatgctggccgcaagactgtgaagccagaggacctggagctgctgatgcggcggcagggcctggtcactgaccaagtctcactgcacgtgctagtggagcggcacctgcccctggagtaccggcagctgctcatcccctgtgcatacagtggcaactctgtcttccctgcccagtag

SEQ ID NO: 466 - DNA, 1038 bp, human
atgctggccgccaacccaggcaagaccccgatcagccttctgcaggagtatgggaccagaatagggaagacgcctgtgtacgaccttctcaaagccgagggccaagcccaccagcctaatttcaccttccgggtcaccgttggcgacaccagctgcactggtcagggccccagcaagaaggcagccaagcacaaggcagctgaggtggccctcaaacacctcaaaggggggagcatgctggagccggccctggaggacagcagttctttttctcccctagactcttcactgcctgaggacattccggtttttactgctgcagcagctgctaccccagttccatctgtagtcctaaccaggagcccccccatggaactgcagccccctgtctcccctcagcagtctgagtgcaaccccgttggtgctctgcaggagctggtggtgcagaaaggctggcggttgccggagtacacagtgacccaggagtctgggccagcccaccgcaaagaattcaccatgacctgtcgagtggagcgtttcattgagattgggagtggcacttccaaaaaattggcaaagcggaatgcggcggccaaaatgctgcttcgagtgcacacggtgcctctggatgcccgggatggcaatgaggtggagcctgatgatgaccacttctccattggtgtgggctcccgcctggatggtcttcgaaaccggggcccaggttgcacctgggattctctacgaaattcagtaggagagaagatcctgtccctccgcagttgctccctgggctccctgggtgccctgggccctgcctgctgccgtgtcctcagtgagctctctgaggagcaggcctttcacgtcagctacctggatattgaggagctgagcctgagtggactctgccagtgcctggtggaactgtccacccagccggccactgtgtgtcatggctctgcaaccaccagggaggcagcccgtggtgaggctgcccgccgtgccctgcagtacctcaagatcatggcaggcagcaagtga

SEQ ID NO: 467 - DNA, 1947 bp, human
atggagaaggccaggagaggcggggatggcgtcccccgggggcccgtactgcacatcgtggtggtcggatttcaccacaagaagggctgccaggttgaattctcttacccgcccctgattccaggagatggacatgacagccacactttacctgaagaatggaagtatttgcccttccttgccttaccagatggcgcacacaactaccaggaagatactgtgttttttcacttgccacccagaaatggaaatggagccacagtatttggtatctcttgctatcgacaaattgaagccaaggcactgaaagtaaggcaagcagatatcaccagagagactgttcagaaaagtgtctgtgttctaagcaagctgcctctgtatggtttacttcaagcaaaacttcaactcattacacatgcatattttgaagagaaggatttttcccaaatttctattctaaaggagctttatgaacatatgaatagttccttgggaggtgcttcattagaaggatcccaagtatatcttggtctgtcacctcgagatcttgtccttcattttcgacacaaggtcttaatcctatttaagctaattcttcttgaaaaaaaggttcttttttatatttctccagtgaataaattggtgggtgcactgatgactgtgttatccctttttccaggcatgattgaacatggtctcagtgactgttctcagtatagaccccggaaaagtatgtctgaagatggtgggcttcaggaaagtaacccatgtgcagatgattttgtttctgcatccactgctgatgtttcacataccaacttgggaactatcaggaaagtcatggcaggaaaccatggagaagatgctgccatgaagactgaggagcctttgttccaagtggaagacagcagcaaagggcaggaacccaatgataccaatcaatatttgaaacctccatctcgcccatctccagattcttcagaaagtgactgggaaactttggatcctagtgtcttagaggaccccaacttgaaagaaagggaacagctgggatcagaccagacaaatttgtttccaaaggactctgtcccctcagagagtcttccaattactgtacaacctcaagctaatacgggacaggtagtcctgataccagggctcatttcgggtttggaagaggatcagtatggcatgcccctggccatcttcacaaagggatatctgtgtttgccttacatggcattgcagcagcatcatcttctctccgatgtcaccgttcgggggtttgttgctggagctactaacatcctttttcgacaacagaaacacctcagtgatgccattgtggaagtagaagaagctctgatccagatccatgatccagaactcaggaagctgcttaacccaaccactgcagacctaaggttcgcagactacctagtgaggcacgtgactgagaatcgggatgacgtcttcctagatggcacgggctgggagggaggtgacgaatggatccgggcccagtttgcggtctacattcatgccctgctggctgccacgctgcaattagacaatgaaaagatattatcggactatgggacaacttttgttacagcatggaagaatactcacaactacagggtgtggaacagcaacaagcatccagcacttgcagaaataaatccaaaccatccatttcaaggccaatactcagtatcagacatgaagttaaggttctcacattctgttcagaatagtgaacgtggcaaaaaaattggaaacgtcatggtcacaactagccggaatgttgtacaaacaggaaaagctgttggccagtcagttggaggagctttttccagtgcaaagacagctatgtcttcatggctttccactttcaccacttccacctcccaaagtctcactgagccaccagatgagaagccttga

SEQ ID NO: 468 - DNA, 903 bp, human
atggcggcggtggctgcgttgcagctggggctgcgggcggcggggctgggacgggccccggccagcgccgcctggaggagcgtcctcagggtctccccgcgcccaggggtggcctggaggccaagcagatgtggcagttctgcagcagaagcatctgccacaaaagcggaagatgactcctttcttcagtgggtcctgctcctcatccctgtgactgcctttggcttggggacatggcaggtccagcgtcggaagtggaagctgaacctgattgcagagttggagtccagagttctggctgagcctgtccctctgccagccgacccaatggaactgaaaaatctggagtataggccagtgaaggtcagggggtgctttgaccattccaaggagctgtatatgatgccccggaccatggtggaccctgtccgggaggcccgggagggcggcctcatctcctcctcaactcagagtggggcctatgtggtcactcccttccactgcaccgacctgggagtcaccatcctggtaaatagagggttcgttcccaggaagaaagtgaatcctgaaacccggcagaaaggccagattgagggagaagtggacctcattgggatggtgaggctgacagaaaccaggcagccttttgtccctgagaacaatccagaaaggaaccactggcattatcgagacctggaagctatggccagaatcacaggcgcagagcccatcttcattgatgccaacttccagagcacagtccctggaggacccattggagggcaaaccagagttactctgaggaacgagcatctgcagtacatcgtgacctggtatggactctctgcagctacatcctacctgtggtttaagaaattcctacgtgggacacctggtgtgtga

SEQ ID NO: 469 - DNA, 1410 bp, human
atgaatgatttcggaatcaagaatatggaccaggtagcccctgtggctaacagttacagagggacactcaagcgccagccagcctttgacacctttgatgggtccctgtttgctgtttttccttctctaaatgaagagcaaacactgcaagaagtgccaacaggcttggattccatttctcatgactccgccaactgtgaattgcctttgttaaccccgtgcagcaaggctgtgatgagtcaagccttaaaagctaccttcagtggcttcaaaaaggaacagcggcgcctgggcattccaaagaacccctggctgtggagtgagcaacaggtatgccagtggcttctctgggccaccaatgagttcagtctggtgaacgtgaatctgcagaggttcggcatgaatggccagatgctgtgtaaccttggcaaggaacgctttctggagctggcacctgactttgtgggtgacattctctgggaacatctggagcaaatgatcaaagaaaaccaagaaaagacagaagatcaatatgaagaaaattcacacctcacctccgttcctcattggattaacagcaatacattaggttttggcacagagcaggcgccctatggaatgcagacacagaattaccccaaaggcggcctcctggacagcatgtgtccggcctccacacccagcgtactcagctctgagcaggagtttcagatgttccccaagtctcggctcagctccgtcagcgtcacctactgctctgtcagtcaggacttcccaggcagcaacttgaatttgctcaccaacaattctgggactcccaaagaccacgactcccctgagaacggtgcggacagcttcgagagctcagactccctcctccagtcctggaacagccagtcgtccttgctggatgtgcaacgggttccttccttcgagagcttcgaagatgactgcagccagtctctctgcctcaataagccaaccatgtctttcaaggattacatccaagagaggagtgacccagtggagcaaggcaaaccagttatacctgcagctgtgctggccggcttcacaggaagtggacctattcagctgtggcagtttctcctggagctgctatcagacaaatcctgccagtcattcatcagctggactggagacggatgggagtttaagctcgccgaccccgatgaggtggcccgccggtggggaaagaggaaaaataagcccaagatgaactacgagaagctgagccggggcttacgctactattacgacaagaacatcatccacaagacgtcggggaagcgctacgtgtaccgcttcgtgtgcgacctccagaacttgctggggttcacgcccgaggaactgcacgccatcctgggcgtccagcccgacacggaggactga

SEQ ID NO: 470 - DNA, 882 bp, human
atggcgatggagatgaggcttccagtggctcgcaagcctcttagcgagagactgggccgcgacactaagaaacatctagtggtgccgggggatacaatcactacggacacaggattcatgcggggccatggaacgtatatgggagaagagaagctcattgcatctgttgctggctctgtggagagagtaaacaagttgatctgtgtgaaagctttgaaaaccagatacattggtgaagtaggagacatcgtagtgggacgaatcacagaggttcaacagaagaggtggaaggtggagaccaactccaggctggattcggtcttgctgctctcgtccatgaaccttcctggaggagagctgaggagaagatctgcagaagatgagcttgcaatgagaggtttcttacaggaaggggaccttatcagtgctgaggtccaggcagtgttctctgacggagctgtctctttgcacacgaggagcctgaaatatggaaaactaggtcagggggttttggtccaggtttccccctccctggtgaaacggcagaagacccactttcatgatttgccatgtggtgcctcagtgattctcggtaacaacggcttcatctggatttacccaacacctgagcacaaagaagaggaagcagggggcttcattgcaaacctggagcctgtctctcttgctgatcgagaggtgatatcccggcttcggaactgcatcatctcgctggtaactcagaggatgatgctgtatgataccagcatcctgtactgctatgaagcatcccttccacatcagatcaaagacatcttaaagccagaaataatggaggagattgtgatggaaacacgccagaggcttttggaacaggagggataa

SEQ ID NO: 471 - DNA, 2508 bp, human
atggcggcctccgcggcggcagcctcggcagcagcggcctcggccgcctctggcagcccgggcccgggcgagggctccgctggcggcgaaaagcgctccaccgccccttcggccgcagcctcggcctctgcctcagccgcggcgtcgtcgcccgcggggggcggcgccgaggcgctggagctgctggagcactgcggcgtgtgcagagagcgcctgcgacccgagagggagccccgcctgctgccctgtttgcactcggcctgtagtgcctgcttagggcccgcggcccccgccgccgccaacagctcgggggacggcggggcggcgggcgacggcaccgtggtggactgtcccgtgtgcaagcaacagtgcttctccaaagacatcgtggagaattatttcatgcgtgatagtggcagcaaggctgccaccgacgcccaggatgcgaaccagtgctgcactagctgtgaggataatgccccagccaccagctactgtgtggagtgctcggagcctctgtgtgagacctgtgtagaggcgcaccagcgggtgaagtacaccaaggaccatactgtgcgctctactgggccagccaagtctcgggatggtgaacgtactgtctattgcaacgtacacaagcatgaaccccttgtgctgttttgtgagagctgtgatactctcacctgccgagactgccagctcaatgcccacaaggaccaccagtaccagttcttagaggatgcagtgaggaaccagcgcaagctcctggcctcactggtgaagcgccttggggacaaacatgcaacattgcagaagagcaccaaggaggttcgcagctcaatccgccaggtgtctgacgtacagaagcgtgtgcaagtggatgtcaagatggccatcctgcagatcatgaaggagctgaataagcggggccgtgtgctggtcaatgatgcccagaaggtgactgaggggcagcaggagcgcctggagcggcagcactggaccatgaccaagatccagaagcaccaggagcacattctgcgctttgcctcttgggctctggagagtgacaacaacacagcccttttgctttctaagaagttgatctacttccagctgcaccgggccctcaagatgattgtggatcccgtggagccacatggcgagatgaagtttcagtgggacctcaatgcctggaccaagagtgccgaggcctttggcaagattgtggcagagcgtcctggcactaactcaacaggccctgcacccatggcccctccaagagccccagggcccctgagcaagcagggctctggcagcagccagcccatggaggtgcaggaaggctatggctttgggtcaggagatgatccctactcaagtgcagagccccatgtgtcaggtgtgaaacggtcccgctcaggtgagggcgaggtgagcggccttatgcgcaaggtgccacgagtgagccttgaacgcctggacctggacctcacagctgacagccagccacccgtcttcaaggtcttcccaggcagtaccactgaggactacaaccttattgttattgaacgtggcgctgccgctgcagctaccggccagccagggactgcgcctgcaggaacccctggtgccccacccctggctggcatggccattgtcaaggaggaggagacggaggctgccattggagcccctcctactgccactgagggccctgagaccaaacctgtgcttatggctcttgcggagggtcctggtgctgagggtccccgcctggcctcacctagtggcagcaccagctcagggctggaggtggtggctcctgagggtacctcagccccaggtggtggcccgggaaccctggatgacagtgccaccatttgccgtgtctgccagaagccaggcgatctggttatgtgcaaccagtgtgagttttgtttccacctggactgtcacctgccggccctgcaggatgtaccaggggaggagtggagctgctcactctgccatgtgctccctgacctgaaggaggaggatggcagcctcagcctggatggtgcagacagcactggcgtggtggccaagctctcaccagccaaccagcggaaatgtgagcgtgtactgctggccctattctgtcacgaaccctgccgccccctgcatcagctggctaccgactccaccttctccctggaccagcccggtggcaccctggatctgaccctgatccgtgcccgcctccaggagaagttgtcacctccctacagctccccacaggagtttgcccaggatgtgggccgcatgttcaagcaattcaacaagttaactgaggacaaggcagacgtgcagtccatcatcggcctgcagcgcttcttcgagacgcgcatgaacgaggccttcggtgacaccaagttctctgctgtgctggtggagcccccgccgatgagcctgcctggtgctggcctgagttcccaggagctgtctggtggccctggtgatggcccctga

SEQ ID NO: 472 - DNA, 6807 bp, human
atgtctggcttgcacctagtaaagcagggccgagacagaaagaaaatagattctcaacgagatttcactgtggcttctccagcagaatttgttactcgctttgggggaaataaagtgattgagaaggttcttattgctaacaatggcattgcagcagtgaaatgcatgcggtctatccgtaggtggtcttatgaaatgtttcgaaatgaacgtgcaattagattcgttgtcatggtcacacctgaagaccttaaagccaatgcagaatacattaagatggcagatcactatgtgccagtgcctggaggaccaaacaacaacaactatgcaaatgtggaattaattcttgatattgctaaaaggatcccagtacaagcagtgtgggctggctggggtcatgcttctgagaatcccaaactaccggaacttctcttgaaaaatggcattgccttcatgggtcctccaagccaggccatgtgggctttaggggataagattgcatcttccatagtggctcaaactgcaggtatcccaactcttccctggagcggcagtggtcttcgtgtggactggcaggaaaatgatttttcaaaacgtatcttaaatgttccccaggagctatatgaaaaaggttatgtgaaagatgtggatgatgggctacaggcagctgaggaagttggatatccagtaatgatcaaggcctcagagggaggaggagggaagggaattagaaaagtcaacaatgcagatgacttccctaatctcttcagacaggttcaagctgaagttcctggatctcccatatttgtgatgagactagccaaacaatctcgtcatctggaggtgcagatcttagcggaccaatatggcaatgctatctctttgtttggtcgtgattgctctgtacaacgcaggcatcagaagattattgaagaagcacctgctactattgctactccagcagtatttgaacacatggaacagtgtgcggtgaaacttgccaaaatggtgggttatgtgagtgctgggactgtggaatacctgtacagccaggatggcagcttctactttctggaattgaatcctcggctgcaggtagagcacccttgtacagagatggtggctgatgtcaatctccctgcagcacagctccagattgccatggggattcctctatatagaatcaaggatatccgtatgatgtatggggtatctccctggggtgattctcccattgattttgaagattctgcacacgttccttgtccaaggggccatgttattgctgctcggatcactagtgaaaatccagatgagggttttaagcccagctcaggaacagttcaggagctaaatttccgcagcaataagaatgtttggggatatttcagtgttgctgctgcagggggacttcatgaatttgctgattctcagtttggtcactgcttttcttggggagaaaacagagaagaggcaatttcaaacatggtggtggctttgaaggagctgtctattcggggtgactttcgaactacagttgaatacctgatcaaattgttagagactgaaagctttcagatgaacagaattgatactggctggctggacagactgatagcagaaaaagtacaggctgagcgacctgacaccatgttgggggttgtgtgtggtgccctccacgtggcagatgtgagcctgcggaatagcgtctctaacttccttcactccttagaaaggggtcaagtccttcctgctcatacacttctgaatacagtagatgttgaacttatctatgagggagtcaagtatgtacttaaggtgactcgacagtcccccaactcctatgtggtgatcatgaatggctcatgtgtagaagtagatgtacatcggctgagtgacggtggactgctcttgtcctatgatggcagcagttatactacgtatatgaaagaggaagtggatagatatcgcatcacaattggcaataaaacctgtgtgtttgagaaggaaaatgacccatcggtgatgcgctcaccttctgctgggaagttaatccagtacattgtagaagatggaggtcatgtgtttgccggccagtgctatgctgagattgaggtaatgaagatggtaatgaccttaacagctgtggagtctggctgtatccattacgtcaagcgacctggagcagctcttgaccctggctgtgtactagccaaaatgcaactggacaaccccagcaaggttcagcaggctgaacttcacacaggtagtctgccacggatccagagcacggcactcagaggcgagaaactccatcgagtgttccattatgtcctggataatctggtcaatgtaatgaatggatactgccttccagatcctttctttagcagcaaggtaaaagactgggtagagcgattgatgaaaaccctcagagatccctccctgcctctcctagaattgcaagatattatgaccagtgtgtctggccgcattccccccaatgtggagaagtctatcaagaaggaaatggctcagtatgctagcaacatcacatcagtcctctgtcagtttcccagccagcagattgcaaacatcctagatagccatgcagctacattgaaccggaaatctgaacgggaagtcttctttatgaatactcagagcattgttcagctggtacagaggtaccgaagtggcatccgaggccacatgaaggctgtggtgatggatctgctccggcagtacctgcgagtagagacacaattccagaatggtcactatgacaaatgtgtattcgccctccgagaagagaataaaagtgacatgaacactgtactgaactacatcttctctcacgctcaagtcaccaagaagaatcttctggtcacaatgcttattgatcagttgtgtggccgggaccctactctcactgatgagctgctgaatattctcacagagctaactcaactcagtaagaccaccaatgccaaagtagcacttcgagcacgccaggttcttattgcctcccatttgccatcatatgagcttcgccataaccaagtagagtctatcttcctatcagctattgacatgtatggacatcaattttgcattgagaacctgcagaaactcatcctatcagaaacatctatttttgatgtcctaccaaacttcttctatcacagcaaccaagtagtgaggatggcagctctggaggtgtatgttcgaagggcttatattgcctatgaacttaacagcgtacaacaccgccagcttaaggacaacacctgtgtggtggaattccagttcatgctgcccacatctcatccaaacagagggaacatccctacgctaaacagaatgtccttctcctccaacctcaaccactatggcatgacccatgtagctagtgtcagcgatgtactgttggacaactcattcactccaccttgtcagcggatgggcggaatggtctcttttcggacttttgaagattttgtcaggatctttgatgaagtgatgggctgcttctctgactccccaccccagagtcccacattccctgaggcaggtcacacgtctctttatgatgaggataaggttcccagggatgaaccaattcacattctcaatgtggctatcaagactgactgtgatattgaggatgacaggctggcagctatgttcagagaatttacccagcaaaataaagctaccctggttgaccatgggatccggcgccttactttcctggttgcacaaaaggatttcagaaagcaggtcaactatgaggtggatcggagatttcatagagaattccctaaattttttacattccgagcaagggataagtttgaggaggatcgtatctatcgtcatctggagcctgctctggctttccagttagagctgaaccggatgagaaattttgacctcactgccattccatgtgctaatcacaagatgcacctgtatctcggggcagccaaggtggaagtgggcacagaagtgacagactacaggttctttgttcgtgcaatcatcaggcattctgatctggtcaccaaggaagcttcttttgaatatctgcaaaatgaaggggagcggctactcctggaagccatggatgagttggaagttgcttttaacaatacaaatgtccgcactgactgtaaccacatcttcctcaactttgtgcccacggttatcatggacccatcaaagattgaggaatccgtgcggagcatggtaatgcggtatggaagtcgcctgtggaaattgcgcgtcctccaggcagaactgaaaatcaacattcgcctgacgccaactggaaaagcaattcccatccgcctcttcctgacaaacgagtctggctattacttggatatcagcctatacaaggaagtgactgactccaggacagcacagatcatgtttcaggcatatggagacaaacagggaccactgcatggaatgttaatcaatactccatatgtgaccaaagacctgctgcaatcaaagaggttccaggcacaatccttagggacaacatacatatatgatatcccagagatgtttcggcagtccctgatcaaactctgggagtctatgtccactcaagcatttcttccatctccccctctgccttctgacatgctgacttacactgaactggtactggatgatcaaggtcagctggtccacatgaacaggcttccaggaggaaatgagattggcatggtagcttggaaaatgacctttaaaagtcctgaatatccagaaggccgagatatcattgttattggcaatgacatcacataccgaattgggtcctttgggcctcaagaggatttgttatttctcagagcttccgaacttgctagggcagaaggtattccacgcatctatgtatcagccaacagtggagcaagaatcggactggcagaagaaattcgccatatgtttcatgtggcctgggtagatcctgaggatccttacaagggatacaggtatttatatctgactcctcaagattataagagagtcagtgctctcaactctgtccattgtgaacacgtggaagatgaaggagaatccaggtacaagataacagatattattgggaaagaagagggaattggacccgagaaccttcgaggttctggaatgattgctggagaatcctcattggcctataatgagatcattaccatcagcctggtgacgtgccgggccattgggattggggcttaccttgtccggctgggacagagaaccatccaggttgagaattctcacttaattctaacaggagctggagccctcaacaaagtcctcgggcgggaagtgtacacctccaataaccagctggggggcatccagattatgcacaacaatggggtgacccactgcactgtgtgtgatgactttgaaggggttttcactgtcctgcactggctgtcttacatgcccaagagcgtgcacagttcagttcctcttctgaactcaaaggatcctatagacagaatcatcgagtttgttcccacaaagaccccatacgatcctcgatggatgctagcaggccgtcctcacccaacccaaaaaggtcagtggttgagtggcttttttgactatggatctttctcagagattatgcagccctgggcacagactgtggtggttggtagagccaggctaggaggaatacctgtgggagttgttgctgtagaaacccgaacagtagaactaagtatcccagctgatccagcaaacctggattctgaagccaagataatccagcaggctggccaggtttggttcccagattctgcgtttaagacgtatcaggccatcaaggacttcaaccgggaagggctgcctctgatggtctttgccaactggagaggcttctctggtggaatgaaagatatgtacgaccaagtgctgaagtttggtgcttacattgtggatggcttgagggagtgctgccagcctgtgctggtttacattcctccccaggctgagctgcggggtggctcctgggtggtgattgactcctccatcaacccccggcacatggagatgtatgctgaccgagaaagcaggggatctgttctggagccagaagggacagtagaaatcaaattccgcagaaaggatctggtgaaaaccatgcgtcgggtggacccagtctacatccacttggctgagcgattggggaccccagagctaagcacagctgagcggaaggagttggagaacaagttgaaggagcgggaggaattcctaattcccatttaccatcaggtagccgtgcagtttgctgacttgcacgacacaccaggccggatgcaggagaagggtgttattagcgatatcctggattggaaaacatcccgtaccttcttctactggcggctgaggcgtcttctgctggaggacctggtcaagaagaaaatccacaatgccaaccctgagctgactgatggccagattcaagccatgttaaggcgctggtttgtggaagtggaaggaacagtgaaggcttatgtttgggacaataataaggatctggcggagtggctagagaaacagctgacagaggaggatggtgttcactcggtaatagaggaaaacatcaaatgcatcagcagagactacgtcctcaagcaaatccgcagcttggtccaggccaatccagaggttgccatggattccatcatccatatgacgcagcacatatcacccactcagcgagcagaagtcatacggatcctctccacaatggattccccttccacgtag

SEQ ID NO: 473 - DNA, 3597 bp, human
atggatgaagagactcggcacagccttgagtgcatccaggccaatcagatctttcccaggaagcagctgatccgggaggatgagaatcttcaggttcctttccttgaacttcatggagagagcacagagtttgtgggccgtgccgaggatgccatcattgccctttccaattacagacttcacatcaagttcaaggagtctcttgttaatgttccattacagcttatagaaagtgttgaatgccgagatatatttcagcttcatttgacttgcaaagactgcaaagttatcaggtgtcagttttcaacctttgagcagtgtcaagagtggctgaagagactgaacaacgcaatccgaccacctgctaaaatagaagatctcttctcatttgcataccatgcttggtgcatggaggtctatgccagtgaaaaagagcaacatggagacctgtgcagaccaggggagcatgtaacttcaaggtttaaaaacgaggtggagaggatgggttttgatatgaacaacgcctggaggatttccaacatcaatgagaagtacaaattatgtggtagctatcctcaagagctcatagtgcctgcctggatcactgacaaagaactggaaagtgtatcaagtttcaggtcctggaagcgcatccctgccgtcatctacaggcaccagagcaatggagctgtcattgcccgctgtggacagccagaggttagctggtggggctggcgaaatgcagatgatgagcatctggtacagtcagtagccaaagcttgtgcctctgactcccgatcgagtggcagcaagctgtcaactaggaacacttctcgagactttcccaatgggggagacctttctgacgtggagttcgattcttctctgtcaaatgcttcaggagcagagagtttagccatccaaccgcagaagcttttgatcttggatgcacgctcctatgcagctgctgtggcaaaccgagccaaaggaggaggctgcgaatgcccagagtattacccaaactgtgaagttgtgtttatggggatggcaaacattcattctattcggaggagttttcagtctctgcggttgctgtgcactcagatgccagatccgggaaattggctatcagctcttgaaagcacaaaatggctccatcacttgtctgtgcttctgaaatcagcgcttctggtagtgcatgctgtggatcaggatcagcggccggtgctagtacactgctcagatggctgggaccgcaccccccagattgtggcattggctaagctcttgctggacccttattaccgaaccatagagggtttccaggtcctcgtggaaatggagtggctggattttggccataaatttgctgaccggtgtggtcatggggagaactcggatgatctgaatgaacgttgcccagtgtttctgcagtggcttgactgtgttcatcagcttcagaggcaatttccttgctcttttgagttcaatgaagcattccttgtgaaactggtgcagcatacctattcctgcctgtttggaacattcctgtgcaacaacgccaaggagagaggggaaaagcatactcaggaacggacatgttccgtgtggtcacttcttcgggcaggcaacaaggctttcaaaaacctactgtattcctctcagtcagaagccgtgctgtaccctgtgtgccatgtgcgtaacctgatgctgtggagtgcagtgtacctgccctgcccatccccaaccacccctgtggacgacagctgtgcaccatacccagccccaggcaccagccctgatgatccccccctgagccggctaccaaagactagatcatacgacaatctgaccacagcctgtgacaacacagtgcctctggccagccggcgctgcagcgaccccagcctgaacgagaagtggcaggagcaccggcgctcactagagctgagcagcctggctggccctggagaggatcccctttctgccgacagcctagggaagcccaccagagtgccggggggtgccgagctttctgttgcagccggagtagctgaggggcagatggagaacatcttgcaggaggccaccaaagaggagagtggagtagaggaacctgcccacagggcaggcattgagatacaggagggtaaagaggaccctctcttagaaaaggagagcaggaggaagacacctgaggcctcagccattggacttcaccaagacccagaactgggtgatgctgctctgaggagccatctggatatgagctggcctctgttctcacagggcatttctgaacagcagagtgggctcagtgttctcctcagttctctccaggtcccccccaggggagaggattccctggaggtccctgtggagcagtttcgaatagaagagattgcagagggtagggaggaagcagttcttccaatcccagtagatgcaaaagttggctatggtacctcacagtcatgttctctgctaccttcccaagtcccttttgagaccagaggaccaaacgtggacagttctacagacatgttagtggaagataaggtgaagtcagtaagtgggccccaaggtcatcatagatcttgccttgtaaatagtggcaaggacaggcttcctcagaccatggaacccagcccttcagagacaagcctggtcgagaggccccaagtggggtctgtggtgcataggacttcccttggcagcactctcagcctgacacgttccccttgtgccttgcctttagccgaatgtaaagaggggcttgtgtgcaatggtgccccagagactgaaaacagggcctcagagcagcccccaggtcttagcaccctccagatgtaccccacacccaatgggcattgcgccaatggggaggctggtaggagcaaggactcactgagccgtcagctgtctgctatgagctgcagctctgcccacttacactcaaggaacttgcaccacaagtggctgcatagccactcaggaaggccatctgcaaccagcagccccgaccagccttcccgcagccacctggacgatgatggcatgtcagtgtacacagacacgatccaacagcgcctgcgtcagattgagtcaggccaccagcaggaagtagaaactttgaagaaacaagtccaggagctgaagagtcgcctggagagccagtacctgaccagctccctacactttaatggagactttggggatgaggtgacttcaatccccgactcggaaagcaatctggatcagaactgtttgtctcgctgcagcacagagattttctctgaagccagctgggagcaggtggataaacaggacacagagatgacccgttggcttcctgaccacctggccgcccactgctatgcgtgcgacagtgccttctggcttgccagcaggaagcaccactgcaggaattgtgggaacgtattctgctccagttgttgtaaccagaaggttccagttcccagccagcagctctttgaacccagtcgagtatgcaagtcttgctatagcagcctacatcccacaagctccagcattgaccttgaactggataagcccattgctgccacttccaactga

SEQ ID NO: 474 - DNA, 945 bp, human
atgctggtgtctggtagaagaagattactcacagctctgctgcaggctcagaagtggccctttcaaccctccagagacatgagactagtgcagttccgggcaccccacctggtggggcctcacttgggcctggagacagggaatggtggaggggttatcaacctcaatgcctttgaccccacactcccaaagacgatgacgcagttcctagagcagggagaggccaccctctcagtggcaagaagagccttggctgcccagttgccagtcctaccatggtcggaggtaaccttcctggctccagtcacatggccagataaggtggtgtgtgtgggcatgaattatgtggaccactgcaaagaacagaacgtgcccgtgcccaaggagcccatcatcttcagcaagtttgccagctccatcgtggggccctatgatgaggtggtcctcccaccacagagccaggaggtagattgggaagtggagctggccgtggtcattggaaagaaaggcaagcacatcaaggccacagatgccatggcccacgtggccggcttcactgtggctcatgacgtgagtgctcgtgactggctaacaagacgcaatgggaaacagtggctgctgggaaaaaccttcgacaccttctgccctctgggccctgccttggtgaccaaggacagtgtagcagatccacacaacttaaagatctgctgccgagtgaatggggaagtcgtccagagcagcaacaccaaccagatggtattcaagacagaggacctgatagcctgggtctcccagtttgttaccttttacccaggggatgtcatcctaactgggacccccccaggtgtcggtgtattcaggaaacctcctgtctttctcaagaagggggatgaagtccagtgtgagattgaagaactaggtgtcatcatcaacaaggtggtgtga

SEQ ID NO: 475 - DNA, 903 bp, human
atgtctggttctaatggttccaaagaaaattctcacaataaggctcggacgtctccttacccaggttcaaaagttgaacgaagccaggttcctaatgagaaagtgggctggcttgttgagtggcaagactataagcctgtggaatacactgcagtctctgtcttggctggacccaggtgggcagatcctcagatcagtgaaagtaatttttctcccaagtttaacgaaaaggatgggcatgttgagagaaagagcaagaatggcctgtatgagattgaaaatggaagaccgagaaatcctgcaggacggactggactggtgggccgggggcttttggggcgatggggcccaaatcacgctgcagatcccattataaccagatggaaaagggatagcagtggaaataaaatcatgcatcctgtttctgggaagcatatcttacaatttgttgcaataaaaaggaaagactgtggagaatgggcaatcccaggggggatggtggatccaggagagaagattagtgccacactgaaaagagaatttggtgaggaagctctcaactccttacagaaaaccagtgctgagaagagagaaatagaggaaaagttgcacaaactcttcagccaagaccacctagtgatatataagggatatgttgatgatcctcgaaacactgataatgcatggatggagacagaagctgtgaactaccatgacgaaacaggtgagataatggataatcttatgctagaagctggagatgatgctggaaaagtgaaatgggtggacatcaatgataaactgaagctttatgccagtcactctcaattcatcaaacttgtggctgagaaacgagatgcacactggagcgaggactctgaagctgactgccatgcgttgtag

SEQ ID NO: 476 - DNA, 1089 bp, human
atgtcgggctaccagcgccgcccgggcgccaccccgctgtcccgagcccggagcctcgccattcccgacgatgacagatttgaagatctggaagaggcaaatccattctcttttagagagtttctgaagaccaagaacctcggcctctcgaaagaggatccggccagcagaatttatgcaaaggaagcctcgaggcattccctgggacttgaccacaactccccaccctcccaaaccggcgggtatggcctggagtatcagcagccatttttcgaggatccgacaggggctggtgacctcctggatgaggaggaggatgaggacaccggatggagtggggcctacctgccgtccgccatcgagcagactcaccccgagagggtccctgccggcacgtcgccctgcagcacatacctttcctttttctccaccccgtcggagctggcagggcctgagtctctgccctcgtgggcgttgagtgacactgattctcgcgtgtctccggcctctccggcagggagtcctagcgcagactttgcggttcatggagagtctctgggagacaggcacctgcggacgctgcagataagttacgacgcactgaaagatgaaaattctaagctgagaagaaagctgaatgaggttcagagcttctctgaagctcaaacagaaatggtgaggacgcttgagcggaagttagaagcaaaaatgatcaaggaggaaagcgactaccacgacctggagtcggtggttcagcaggtggagcagaacctggagctgatgaccaaacgggctgtaaaggcagaaaaccacgtcgtgaaactaaaacaggaaatcagtttgctccaggcgcaggtctccaacttccagcgagagaatgaagccctgcggtgcggccagggtgccagcctgaccgtggtgaagcagaacgccgacgtggccctgcagaacctccgggtggtcatgaacagtgcacaggcttccatcaagcaactggtttccggagctgagacactgaatcttgttgccgaaatccttaaatctatagacagaatttctgaagttaaagacgaggaggaagactcttga

SEQ ID NO: 477 - DNA, 1653 bp, human
atgagccacgggcccagcccccggctggccgagtccccgcagctgtccaagggcagcctcctgaccatcctgggcagcccgtcgccggagcgcatggggcctgccgactccttgccgcccacgccgcccagcggcacgccctcgcccgggccgccgcccgcactgcccctgccccccgcgcccgcgctgctggccgacggcgactgggagagccgcgaggagctgcggctgcgggagctggaggaggcgcgggcgcgggcggcgcagatggagaagaccatgcgctggtggtcggactgcactgccaattggcgcgagaaatggagcaaggtgcgcgctgagcgcaaccgcgcgcgcgaggaggtgcgccagctgcgccagcgcctggacgcgctcaccaaggagctggcgggcgcacggcgcgagcgccaagaggcgcagggcgagtgcgaggcacggggccgcgagctggcgcggctgaggggcgcccggggggtcgccgaccagacgcgcgacggccccgagccggaagcggagcgcgagccagtgcgtgacgtcgggtccgagaggccgccaggcagccaggaactggagctggtggagagcctgctgaagagcatgccagaggagtctgaggactgctgggaggcgcgcagcctgggggctgggggcccgcggggcagctcaggccgccaggagcgcagccggctaccctgggaggacacagctgccacggaggaggaggcctccaagttgaccgccctgcggctacggctggatgagtcccagaaggtgctgctcaaggagcgagaggataaactggcgttgagcaggaacattgagaagctagagggggagctcagccagtggaagatcaagtatgaggagctgagcaagaccaagcaggagatgctcaagcagctcagcatcctgaaggaggcgcaccaggacgagctgggccgcatgtctgaggacctggaagatgagctcggtgcacgctccagcatggaccggaaaatggccgagctgaggggcgagatggagcggctgcaggccgaaaacgctgcggagtggggccgccgggagcggctggagacagagaaactgggccttgagcgggagaacaagaagctgcgggcacaggtcggagacctggaggaggcgctggcccggcggcggcggcaaacagccagcgcactggactgcgacctgagggccagccaggccgcgctcttcgagaagaacaaggagctggcagacctgaagcatgtgcatggcaagctgaagaagcagttccaggagaaggtggcagagctggcacatgccaaccggcgggtggagcagcacgaggctgaggtgaagaagctgcggctgcgggtggaggagctcaagaaggagctggcccaggctgaggacgagctggacgaggcccacaaccaggcacgtaagctgcagcggtcgctggacgagcagacggagcagagcgagaacctgcaagtgcaactggagcacctgcagtccaggctccgcaggcagcagcagaacgctcccctcttcgggaagatccgcagtgctcgctttggcaccgaggaggccgaggatggaaccagtgacctggacgaggacgaggacctgcaaatccaggtggcctag

SEQ ID NO: 478 - DNA, 2841 bp, human
atggctgtgtactgctatgcgctcaatagcctggtgatcatgaatagcgccaacgagatgaagagcggcggcggcccggggcccagtggcagcgagacgcccccgcccccgaggagggcagtgctgagccccggcagcgttttcagccccgggagaggcgcctctttcctcttccccccagccgagtcgctgtcccccgaggagccccggagccccgggggctggcggagcggccggcgcaggctgaatagtagcagcggcagtggcagcggcagcagcggcagtagcgtgagcagcccaagttgggctggtcgcctgcgaggggaccggcagcaggtggtggcagccggtaccctctccccgccagggccggaggaggccaagaggaagctgcggatcttgcagcgcgagttgcagaacgtgcaggtgaaccagaaagtgggcatgtttgaggcgcacatccaggcacagagctccgccattcaagcgccccgcagcccgcgtttgggcagggctcgctcgccctccccgtgccccttccgcagcagcagtcagccccctggaagggtcctggttcagggcgcccggagcgaggaacggaggacaaagtcctggggggagcaatgtccagagacttcaggaaccgactccgggaggaaaggagggcccagcctatgctcctcgcaggtgaagaaaggaatgccacctcttcccggccgggctgcccctacaggatcagaggctcagggtccatccgcttttgtaaggatggagaagggtatccctgccagtccccgctgtggctcacccacagctatggaaattgacaaaaggggctctcctaccccgggaactcggagctgcctagctccctcattggggctgttcggagctagcttaacgatggccacggaagtggcagcgagagttacatccactgggccacaccgtccacaggatcttgccctcactgagccgtctgggagagcccgtgagcttgaggacctgcagcccccagaggccctggtggagaggcaggggcagtttctgggcagtgagacaagcccagccccagaaaggggcgggccccgcgatggagaaccccctgggaagatggggaaaggatatctgccctgtggcatgccgggctctggggagcctgaagtgggcaaaaggccagaggagacgactgtgagcgtgcaaagcgcagagtcctctgattccctgagctggtccaggctgcccagggccctggcctccgtaggccctgaggaggcccgaagtggggcccccgtgggcggggggcgttggcagctctccgacagagtggagggagggtccccaacgctgggcttgcttgggggcagcccctcagcacagccggggaccgggaatgtggaggcgggaattccttctggcagaatgctggagcctttgccctgttgggacgctgcgaaagatctgaaagaacctcagtgccctcctggggacagggtgggtgtgcagcctgggaactccagggtttggcagggcaccatggagaaagccggtttggcttggacgcgtggcacaggggtgcaatcagaggggacttgggaaagccagcggcaggacagtgatgccctcccaagtccggagctgctaccccaagatccggacaagcctttcctgaggaaggcctgcagccccagcaacatacctgctgtcatcattacagacatgggcacccaggaggatggggccttggaggagacgcagggaagccctcggggcaacctgcccctgaggaaactgtcctcttcctcggcctcctccacgggcttctcctcatcctacgaagactcagaggaggacatctccagtgaccctgagcgcaccctggaccccaactcagccttcctgcataccctggaccagcagaaacctagagtgagcaaatcatggaggaagataaaaaacatggtgcactggtctcccttcgtcatgtccttcaagaagaagtacccctggatccagctggcaggacacgcagggagtttcaaggcagctgccaatggcaggatcctgaagaagcactgtgagtcagagcagcgctgcctggaccggctgatggtggatgtgctgaggcccttcgtacctgcctaccatggggatgtggtgaaggacggggagcgctacaaccagatggacgacctgctggccgacttcgactcgccctgtgtgatggactgcaagatgggaatcaggacctacctggaggaggagctcacgaaggcccggaagaagcccagcctgcggaaggacatgtaccagaagatgatcgaggtggaccccgaggcccccaccgaggaggaaaaagcacagcgggctgtgaccaagccacggtacatgcagtggcgggagaccatcagctccacggccaccctggggttcaggatcgagggaatcaagaaagaagacggcaccgtgaaccgggacttcaagaagaccaaaacgagggagcaggtcaccgaggccttcagagagttcactaaaggaaaccataacatcctgatcgcctatcgggaccggctgaaggccattcgaaccactctagaagtttctcccttcttcaagtgccacgaggtcattggcagctccctcctcttcatccacgacaagaaggaacaggccaaagtgtggatgatcgactttgggaaaaccacgcccctgcctgagggccagaccctgcagcatgacgtcccctggcaggaggggaaccgggaggatggctacctctcggggctcaataacctcgtcgacatcctgaccgagatgtcccaggatgccccactcgcctga

SEQ ID NO: 479 - DNA, 585 bp, human
atggatgaggacgggcttcctctcatggggtcaggcatagacctgaccaaggtgccagctattcaacagaaaagaacggtggcttttctaaaccaatttgtggtgcacactgtacagttcctcaaccgcttttctacagtttgtgaggagaaactggcagacctttcacttcgtatccaacaaattgaaacaactctcaatattttagatgcaaagttgtcatctatcccaggcctagatgatgtcacagttgaagtatctcctttaaatgtcaccagtgtcacaaatggagcacatcctgaagccacttcagagcaaccacagcagaacagtacacaagactctggactacaggaaagtgaagtatcagcagaaaatatcttaactgtagccaaggatccaagatatgccagatatctcaaaatggttcaagtgggtgtaccagtgatggcaataagaaacaaaatgatatcagaaggactagacccagatcttcttgagaggccagatgctccagtgcctgatggcgaaagtgagaaaactgtagaagaaagttcagatagcgaatcttcttttagtgattaa

SEQ ID NO: 480 - DNA, 5286 bp, human
atggcggacgcggcggcctccccggtgggcaagcggctgctgctgctgttcgcggacactgcggcctcagcctcggcctcggctcccgcggcggcagcggcgagcggagatccggggcctgcgctgcgcactcgagcctggcgggccggcacggtgcgggccatgagcggggcggtgccccaggacctagcgatctttgtagaatttgatggctgtaactggaagcaacactcctgggtaaaagttcatgctgaggaagttatcgtgcttctgctggaagggtctcttgtatgggcgccccgtgaggacccagtccttctccagggcattcgagtctccattgcacaatggccagccctgacttttactccccttgtagataaactgggtttgggttctgtggttccagtggaatatcttctggatcgagagcttcggttcctgtcagatgccaatgggttgcatctgtttcagatgggaacagatagccaaaaccagattcttttggaacatgctgcactgagagaaacagttaatgctttgatcagtgaccaaaagctacaagagatattcagccgaggtccctacagtgttcaaggtcacagggtcaaaatatatcagccagagggggaagaagggtggctctatggtgttgtgagccatcaggactccatcactcgtcttatggaggtgtctgtaactgagagtggtgagatcaagtcggtagatcccagactaatccatgtgatgctgatggataattcaacgcctcaaagcgaggggggtacgttaaaagcagtaaaatcttccaaaggaaagaagaagagagaaagcatagaggggaaagatggccggaggaggaaaagtgcttcggactctgggtgtgaccctgcatcaaagaaattaaaaggagacaggggtgaagtagacagtaatgggagcgatggaggtgaggcaagccgagggccctggaaaggagggaatgccagtggagagccagggctggatcagagagccaagcagccaccgtctacatttgtcccccagataaaccgcaacattcgctttgccacttacaccaaagaaaacggcaggactctggtggtgcaggatgagcctgtaggtggggacacacctgcatctttcactccatattctacagccacaggtcagacacctttggccccagaggtgggtggagccgaaaacaaagaggcaggaaaaacactggaacaagttggccagggcatagtggcttccgcagctgtggtcactaccgccagctccaccccaaacacagtgaggatctcagacactggccttgcagcagggactgtgccagaaaaacagaaaggcagccggtcgcaggcctcgggagagaattcaagaaattctattctggcctcttctggatttggagcacctctccctagttcatcgcaacctttgacttttggaagtggaaggagccagtccaatggtgttctagccacagagaacaaacctttgggcttctcttttggctgtagctctgcacaagaggcacagaaagacactgatctctccaaaaacttgttttttcaatgcatgtcccaaactttacctaccagtaactacttcactactgtttcagagagtttggctgatgattcttctagtcgggactcattcaaacaaagccttgagagcctgagctcaggcctgtgtaaaggcagatccgttcttggaacagacactaagccaggctctaaggctggcagctctgtggaccggaaagtgcctgcagagtccatgcccaccctcactccagccttcccacggagcctcctaaatgcccgtaccccagagaatcatgaaaatctatttttacagccccccaaattgtcccgagaagagccttctaatcctttcctggcatttgtggagaaagttgaacacagccctttcagtagttttgcatctcaggcatcaggtagctcctcttctgctaccactgtcacctccaaggtggcacccagctggcccgagtctcactcctctgcagattcggcatctttagcaaagaagaaacccctcttcattacaactgactcctccaagctagtatctggtgttctgggctcagctcttaccagtgggggcccaagcctctctgccatggggaatggccgctccagctcgcccaccagcagcctcactcagcccattgagatgccaactctctcctctagccccacagaggagaggccaactgtggggcctgggcagcaggacaatcccctcctcaaaacctttagtaacgtctttggcaggcactcaggcggctttctgtcctccccggcagatttttcacaggagaacaaagctccttttgaagctgtgaaaaggttctcactggatgaacgaagcttggcttgcagacaagactcggactccagcaccaacagtgacctgtcagatttgagtgactctgaggagcagctgcaggctaagacaggcctgaagggaattccagagcacctgatggggaagctgggccccaatggggagcgcagtgctgagctgttgctgggcaaaagcaaagggaagcaggcccccaagggccggcctcggactgcccccctgaaagttggccagtcagtgctgaaagatgtaagcaaagtgaagaagctgaagcaatctggagagcccttcctgcaggatgggtcatgcatcaatgtggcacctcatctgcacaagtgtcgtgaatgccgcctggagcggtaccggaagtttaaggaacaggagcaagatgattctactgtagcctgccgtttctttcacttccggaggttgatcttcactcgaaaaggggtactccgtgtggaggggtttttaagcccccagcaaagtgaccctgatgccatgaacctgtggattccctcttcctccctagcagaagggatagatctagagacctcaaaatacatcctggccaatgttggggaccagttctgccagctcgtaatgtctgagaaggaggccatgatgatggtggagccacaccagaaagtggcatggaagcgagctgtgcgtggtgtacgggagatgtgtgatgtgtgtgaaacaactctcttcaacatccactgggtttgtcgcaaatgtggatttggggtctgccttgactgttaccggctcaggaaaagccggccacgcagtgagacagaagagatgggtgatgaagaagttttctcctggttgaagtgtgcaaagggacagtcccacgaaccagagaatctcatgcccacacaaattattcctggcacagctctttacaatattggagacatggtacatgctgcccggggcaagtggggaattaaagcaaactgcccttgtatcagtcgacagaacaaatctgtattgagacctgccgtcaccaatgggatgtcacagcttcctagcataaaccctagtgcctcttctggaaacgaaactaccttctctggtggaggaggaccggcaccagtaacaactccagagccggaccatgttcccaaagccgacagcactgacatcagatctgaagagcctctgaaaacagacagttcggcatcaaatagcaatagtgaactgaaagccatcaggcctccttgccctgacacggccccaccctcctccgccctgcactggttggcagatttagcaactcagaaggctaaagaagaaacaaaagaagcagggtccctgaggtcggtgctcaataaagagtctcattcaccctttgggctggactcgttcaactccactgcaaaggtctctccgctgactccaaagctttttaacagtctgttgctgggtcccactgcctccaacaacaaaaccgaagggtctagccttcgagacctccttcactccgggccgggaaaacttcctcaaacccccttggacacaggcataccctttcccccggtcttctctacatcctcagcaggagtgaagagcaaggccagcctacccaactttcttgaccacatcattgcctcagtggtagaaaataagaaaacctcagatgcttcaaagcgggcctgcaacttgactgatacccagaaggaagtgaaggagatggtgatggggttaaatgtgctagatccccatacttctcactcctggctttgtgatgggaggcttctgtgtctccatgaccccagcaacaaaaacaattggaagatcttccgggagtgttggaagcaaggtcagccagtgctggtttcgggggtacataaaaagctcaagtctgagctctggaagccagaagcctttagccaggaatttggagaccaggatgtagacttggtgaactgcaggaactgtgctataatttccgatgtgaaagttcgggatttctgggatggtttcgagatcatatgcaaacgactacggtcagaagatgggcagccaatggtgctcaaactcaaggactggcctcctggggaagattttcgagacatgatgccaaccaggtttgaagatctgatggagaaccttcctctgccagaatataccaaacgagatggcaggctcaatctggcctctaggctacctagctactttgtaaggcctgatctgggccccaagatgtacaacgcctatgggttgataacagcagaagatagaagagttggtacaacaaatcttcacttagatgtgtctgatgctgttaatgtgatggtgtatgttgggattcccatcggggagggtgctcatgatgaagaggtactcaagacaattgacgagggagatgccgatgaggtgacgaagcagaggattcatgatggaaaagagaagccaggtgctttatggcacatctatgcagccaaggatgcagagaagatccgggagctgctccgaaaggttggagaagaacaaggccaagagaacccccctgatcatgacccaattcatgaccaaagttggtacctggaccagaccctccgtaagcgactctatgaggagtatggcgtgcaaggctgggctattgtgcagttcctaggtgatgctgttttcatacctgctggagccccacaccaggttcacaatctatacagttgcataaaagtagcagaagactttgtatctccagaacatgtaaagcactgtttccgcctgactcaggaattcaggcatctctctaacactcatacaaatcatgaggataaactgcaggtgaagaacatcatttaccatgcagtgaaagatgcggttggcaccctcaaggctcatgaatccaaactggcaaggtcctag

SEQ ID NO: 481 - DNA, 1878 bp, human
atgaacgcggcggtggtgaggcggacgcaggaggcgctggggaaagtgattcggaggccgccgctgaccgagaagctgctgagcaagcccccgttccgctacctgcacgacatcatcacggaggtgattagaatgactggtttcatgaagggcctctacacagacgccgagatgaagtctgataatgtgaaggataaagatgcaaaaattagcttcctacaaaaggccatagacgtggttgtaatggtgtcgggagagccactgttggccaaaccagcccgaatcgtggcggggcatgagcctgaaagaacaaacgagctgctccagataattggaaaatgctgtctcaacaagctctctagtgacgatgcggtgcggagggttttagctggagagaagggagaagtgaaaggccgggcctcactgacctcaagatctcaggaattggataataagaatgtgcgagaagaagagtccagagttcacaaaaatacagaggatagaggagacgctgaaataaaagagagaagtacaagcagagatcgaaaacagaaggaagaattgaaagaagaccgcaagccaagagaaaaggacaaggacaaggagaaggccaaggagaatggcggaaacagacacagagaaggggagagagagagagccaaagcccgggccaggccagacaacgagcgacagaaagacagaggcaacagggagcgggacagagactccgagcgcaagaaggagacagagagaaagagtgagggggggaaagagaaggagagactgagagacagggaccgagagcgcgaccgggacaaagggaaggacagggacagacggagagtgaaaaacggggagcactcctgggacctggacagggagaagaacagagagcatgacaaacctgagaaaaagtcagcaagctcaggggagatgtctaaaaagttatcagatggaacttttaaagactccaaggctgaaacagagactgagatttccactagagcttccaagtcattgacaacaaaaacatcaaaacggcgatccaaaaattcagtggaaggtgactccaccagtgatgcagaaggagatgctggacctgctggccaagataagtctgaggtgccagagactccagaaattcctaatgagctttcatccaacatcagaagaattcctcggcctgggagtgcaagaccagcccctccccgggtcaaacggcaagacagcatggaggcgctacaaatggataggtcagggagtggtaaaaccgtttcaaatgtgattacagagtcacacaattctgacaatgaagaggatgatcaatttgtggtggaagctgcccctcagctctctgaaatgtcagaaattgaaatggtaacagcagtggaactagaagaagaggagaagcatggtggacttgtgaaaaaaattttggagacgaagaaagattatgagaaattgcagcagtcacccaaacctggggagaaggagcgatctctctttgagtcggcatggaagaaggagaaggacatcgtttccaaggagatagagaagctccgcacgtccatccagaccctgtgcaagagcgcacttcccctggggaagatcatggactacatccaggaagacgtggatgccatgcagaatgagctgcagatgtggcacagcgagaacaggcagcacgccgaggccctgcagcaggagcagaggatcacagactgtgccgtggagcccttaaaggctgagctcgcggagctggagcagctgatcaaagaccagcaagacaagatctgtgctgtgaaggccaacatcctcaagaatgaagaaaaaatccagaaaatggtatatagtatcaatttgacttcgagaaggtga

SEQ ID NO: 482 - DNA, 528 bp, human
atggacatcgccatccaccacccctggatccgccgccccttctttcctttccactcccccagccgcctctttgaccagttcttcggagagcacctgttggagtctgatcttttcccgacgtctacttccctgagtcccttctaccttcggccaccctccttcctgcgggcacccagctggtttgacactggactctcagagatgcgcctggagaaggacaggttctctgtcaacctggatgtgaagcacttctccccagaggaactcaaagttaaggtgttgggagatgtgattgaggtgcatggaaaacatgaagagcgccaggatgaacatggtttcatctccagggagttccacaggaaataccggatcccagctgatgtagaccctctcaccattacttcatccctgtcatctgatggggtcctcactgtgaatggaccaaggaaacaggtctctggccctgagcgcaccattcccatcacccgtgaagagaagcctgctgtcaccgcagcccccaagaaatag

SEQ ID NO: 483 - DNA, 1722 bp, human
atgcttcggttacccacagtctttcgccagatgagaccggtgtccagggtactggctcctcatctcactcgggcttatgccaaagatgtaaaatttggtgcagatgcccgagccttaatgcttcaaggtgtagaccttttagccgatgctgtggccgttacaatggggccaaagggaagaacagtgattattgagcagagttggggaagtcccaaagtaacaaaagatggtgtgactgttgcaaagtcaattgacttaaaagataaatacaaaaacattggagctaaacttgttcaagatgttgccaataacacaaatgaagaagctggggatggcactaccactgctactgtactggcacgctctatagccaaggaaggcttcgagaagattagcaaaggtgctaatccagtggaaatcaggagaggtgtgatgttagctgttgatgctgtaattgctgaacttaaaaagcagtctaaacctgtgaccacccctgaagaaattgcacaggttgctacgatttctgcaaacggagacaaagaaattggcaatatcatctctgatgcaatgaaaaaagttggaagaaagggtgtcatcacagtaaaggatggaaaaacactgaatgatgaattagaaattattgaaggcatgaagtttgatcgaggctatatttctccatactttattaatacatcaaaaggtcagaaatgtgaattccaggatgcctatgttctgttgagtgaaaagaaaatttctagtatccagtccattgtacctgctcttgaaattgccaatgctcaccgtaagcctttggtcataatcgctgaagatgttgatggagaagctctaagtacactcgtcttgaataggctaaaggttggtcttcaggttgtggcagtcaaggctccagggtttggtgacaatagaaagaaccagcttaaagatatggctattgctactggtggtgcagtgtttggagaagagggattgaccctgaatcttgaagacgttcagcctcatgacttaggaaaagttggagaggtcattgtgaccaaagacgatgccatgctcttaaaaggaaaaggtgacaaggctcaaattgaaaaacgtattcaagaaatcattgagcagttagatgtcacaactagtgaatatgaaaaggaaaaactgaatgaacggcttgcaaaactttcagatggagtggctgtgctgaaggttggtgggacaagtgatgttgaagtgaatgaaaagaaagacagagttacagatgcccttaatgctacaagagctgctgttgaagaaggcattgttttgggagggggttgtgccctccttcgatgcattccagccttggactcattgactccagctaatgaagatcaaaaaattggtatagaaattattaaaagaacactcaaaattccagcaatgaccattgctaagaatgcaggtgttgaaggatctttgatagttgagaaaattatgcaaagttcctcagaagttggttatgatgctatggctggagattttgtgaatatggtggaaaaaggaatcattgacccaacaaaggttgtgagaactgctttattggatgctgctggtgtggcctctctgttaactacagcagaagttgtagtcacagaaattcctaaagaagagaaggaccctggaatgggtgcaatgggtggaatgggaggtggtatgggaggtggcatgttctaa

SEQ ID NO: 484 - DNA, 744 bp, human
atggaggagcagccccagatgcaagacgccgacgagcccgcggactccggaggggaaggccgggcaggcgggccaccgcaggtcgccggcgcccaggcggcgtgcagcgaggaccgcatgaccctgctcctcaggctgagagcacagacaaaacaacaactcttagaatataaatcaatggttgatgcaagtgaagaaaaaactccagaacaaattatgcaagaaaagcaaatcgaagctaaaattgaagacctggaaaatgaaattgaagaggtaaaagttgcttttgagataaaaaagcttgcattagacaggatgagactttcaactgcacttaaaaaaaacctggagaaaattagcagacagtctagtgtgctcatggataacatgaaacacctattagagctaaataaattaataatgaaatcacagcaggaatcttgggatttagaggaaaaactgcttgatattagaaagaagagattgcaattaaaacaagcttcagaaagtaagcttttagaaatacagactgaaaagaacaaacagaagattgatttggacagtatggaaaactcagagaggataaagatcatacgacaaaacctacagatggagataaaaattactactgttattcaacatgtgttccagaaccttattttggggagtaaagtcaattgggcagaggatcctgcccttaaggaaattgttctgcagcttgagaagaatgttgacatgatgtaa

SEQ ID NO: 485 - DNA, 312 bp, human
atgagcctgcgggtttgcctcaagaaacttcatgagggtctcttactaactccattacactctctctcctggagcctcatctccatgtcaagcaggagggtaaagaagggaactaagagcaggtctttcaagccacacccccacctgcggatggatgggtttctctgtaggccatgcaggcctttgttgcagcaaaccttcccagcagcccttgagccaagtaaaaccagcacaaccagccaccagtggttggtgaggcagtgcccacaaggctcatgttgtatgcctttgataaggccatcttggctttga

SEQ ID NO: 486 - DNA, 2352 bp, human
atgagccaagaaaaaaatgaaatgtttgaaagtgagtggtcaaaagagagagagagagagaagcagttggcatctggtcttgacactgcagagaaggccttgaaagttgaaagtgaggaattgcaaaaatcaaagtcagagcttatatgcctttataatgaagttcacaatcttccaggggaatcagaaagcaaagaccattttttaatagcatgtgacctgttacaaagagagaattctgaattagaaacaaaggtcttgaagctttcacaagaatttgcacaattaaatcattttactctagggggaaaaactgcaccttctaatttaattacaagtgaaaatacctgtaaagatcctgaatctaatgaaccaattttggaaacagaaattcaaagccgaaaggaagagacagaggaactctgtcccaaattaggagaaagaaagcagaaggaaattccagaggagtcagtaaaggagggcagttttccaagagaggggcagaaggaggagggctcacaacagaatcgagatatgaaagatgaagaaaaagaacagcagttaaccatgaagcctgaggaaattgtgaggcttagagaagagctgagccatataaatcagagccttcttcagtctcagagctctggggatagttcagatgacagtggtgcccagcatccatcatctggagaaaaactaaaatacaaccagcaaggggaagtacaacaacttcaccagaatttgcaccggctccagattctatgcaactcagctgaaaatgagcttcgatatgaacgagggcagaacttggacttaaagcaacataatagcttacttcaggaagaaaacattaagataaagattgaactaaagcatgcccaacagaagttattagacagcacaaagatgtgctcttcactcacggcagagtacaagcactgtcagcagaaaatcaaggaactggagttggaagtacttaaacacactcagagcattaaatcacagaacaacctacaggaaaagctggttcaggagaaatctaaagttgctgatgcagaggaaaagattttggacctgcagcggaaattagaacatgctcataaagtctgtctcacagacacttgtatttcagagaagcagcagctagaggaaaagataaaagaagcaacacaaaatgaagctaaagtaaagcaacaatatcaagaagaacaacagaagaggaaacttctatatcagaacgtagatgagttacacaggcaagtgagaaccttacaagataaagaaaatctactggaaatgacctgttctcagcaacaatccagaattcagcaacaagaggccctacttaaacaactggaaaatgaaaaaagaaaatatgatgagcatgtcaaaagcaaccaggaattgtcagagaagctatctaagctacagcaagagaaggaagctctacgtgaagaatatttgcgattattgaagctgcttaatgtccatgtgagaaactataatgagaaacatcaccaacaaaaagtcaagcttcaaaaagtcaagtatcgtttaactaatgaagtagaactacgagataagagaattaaccaatttgaagatgaaattggaatcctgcaacataaaatagaaaaggagaaggcaatacaggaccagatcactgcccaaaatgataccctgcttctagaaaaaaggaaacttcaggagcaagtcatagagcaagaacagttgatccacagcaacaaatggacgatatcttccatccagagcagggtactttacatggataaagaaaataagcaattacaggaaaatagtcttcgtctcacacagcagattggcttcttagagcgaattataaggagcatccatattcgcagaggagagaatcttaaggagtttcctgttccaaaatggtggcatagaggcaagctggcttctctccctccaacaaagaaacagaaagaaatatacagcactgaggtcttcaccagcaacaatgcagaactccagcatgaggatgagtcagttcctgaggccacagagaagtggaaacactctgagcagatggaaacaacaattagtgacatccttgaatccgaagtagtgaatgaaatattgcctttatcaaactccagtttttcaggaaaaggtttggtagagtcatttgcaagtcttcaagagactgaagagatcaagtcaaaagaagcaatggcaagttcaaagtcccctgaaaagtctcctgagaatcttgtgtgttcacagaattctgaggctggatacataaatgtggcttctctgaaggagacacatggtatacaagaacaagaccaaaagtcagaactataa

SEQ ID NO: 487 - DNA, 2712 bp, human
atggagcctaatgatagtaccagtaccgctgtggaggagcctgacagcttggaggtgttggtgaagaccttggactctcaaactcgtacctttattgtgggggcccagatgaatgtaaaagagtttaaggagcacattgctgcctctgtcagcatcccatctgaaaaacaacggctcatttaccagggacgagttctgcaagatgataagaagcttcaggaatacaatgttgggggaaaggttatccacctggtggaacgggctcctcctcagactcacctcccttctggggcatcttctgggacggggtctgcctcagccactcatggtgggggatccccccctggtactcgggggcctggggcctctgttcatgaccggaatgccaacagctatgtcatggttggaaccttcaatcttcctagtgacggctctgctgtggatgttcacatcaacatggaacaggccccgattcagagtgagccccgggtacggctggtgatggctcagcacatgatcagggatatacagaccttactatcccggatggagtgtcgaggagggccccaaccgcagcacagtcagccgcccccgcagccaccggctgtgaccccggagccagtagccttgagctctcaaacatcagaaccagttgaaagtgaagcacctccccgggagcccatggaggcagaagaagtggaggagcgtgccccagcccagaacccggagctcactcctggcccagccccagcgggcccaacacctgccccggaaacaaatgcacccaaccatccttcccctgcggagtatgtcgaggtgctccaggagctacagcggctggagagtcgcctccagcccttcttgcagcgctactacgaggttctgggtgctgctgccaccacggactacaataacaatcacgagggccgggaggaggatcagcggttgatcaacttggtaggggagagcctgcgactgctgggcaacacctttgttgcactgtctgacctgcgctgcaatctggcctgcacgcccccacgacacctgcatgtggtccggcctatgtctcactacaccacccccatggtgctccagcaggcagccattcccatacagatcaatgtgggaaccactgtgaccatgacaggaaatgggactcggccccccccaactcccaatgcagaggcacctccccctggtcctgggcaggcctcatccgtggctccgtcttctaccaatgtcgagtcctcagctgagggggctcccccgccaggtccagctcccccgccagccaccagccacccgagggtcatccggatttcccaccagagtgtggaacccgtggtcatgatgcacatgaacattcaagattctggcacacagcctggtggtgttccgagtgctcccactggccccctgggaccccctggtcatggccaaaccctgggacagcaggtgccaggcttcccaacagctccaacccgggtggtgattgcccggcccactcctccacaggctcggccttcccatcctggagggcccccagtctctgggacactgggcgccggtctgggtaccaatgcctcgttggcccagatggtgagcggccttgtggggcagcttcttatgcagccagtccttgtggctcaggggaccccagggagtcctggaggcctgggtcttgagagcctgtcaccggagttttttacctcagtggtgcagggtgtgctcagctccctgctgggctccctgggggctcgggctggcagcagtgaaagtattgctgccttcatacaacgcctcagtggatccagcaacatctttgagcctggagctgatggggcccttggattctttggggccttgctttctcttctgtgccagaacttctctatggtggacgtagtgatgcttctccatgggcatttccagccactacaacggctccagccccagctgcgatccttcttccaccagcactacctgggtggtcaggagcccacacccagtaacatccggatggcaacccacacattgatcacggggctagaagagtatgtgcgggagagtttttccttggtgcaggttcagccaggtgtggacatcatccggacaaacctggaatttctccaagagcagtttaatagcattgctgcgcatgtgctgcattgcacagatagtggatttggggcccggttgctggagttgtgtaaccaaggcctgtttgaatgcctggccctaaacctgcactgcttggggggacagcagatggagcttgctgctgttatcaatggccgaattcgtcgtatgtctcgtggggtgaatccctccttggtgagctggctgaccactatgatgggactgaggcttcaggtggtactggagcacatgcctgtaggccctgatgccattctcagatacgttcgcagggttggtgatcccccccagccacttcctgaggagccaatggaagttcagggagcagaaagagcttcccctgagcctcaggaatgggtccctattatccagcaggacattcagagccagcggaaggtgaaaccgcagccccctctgagtgatgcctacctcagtggtatgcctgccaagagacgcaagctccggtctgatatacaaaaacgactgcaggaagaccccaactacagtccccagcgcttccccaatgcccagcgggcctttgctgatgatccttag

SEQ ID NO: 488 - DNA, 588 bp, human
atggcgccggccgcgtccaggctgcgggccgaagccgggctcggggcgctgccgcggcgggcgctcgcccagtacttgctcttcctgcggctctacccggtgctcaccaaggcggccaccagtggcattttgtcagcacttgggaacttcctggcccagatgattgagaagaagcggaaaaaagaaaactctagaagtctggatgtcggtgggcctctgagatatgccgtttacgggttcttcttcacagggccgctgagtcacttcttctacttcttcatggaacattggatccctcctgaggtccccctggcagggctcaggaggcttctcctggaccgcctcgtctttgcaccggccttcctcatgttgttcttcctcatcatgaactttctggaggggaaagacgcctcagccttcgccgccaagatgagggggggcttctggccggcgctgaggatgaactggcgggtgtggacgccactacagttcatcaacatcaactacgtccctctgaagttccgggtgctcttcgccaacctggcagctctgttctggtatgcctacctggcctccttggggaagtga

SEQ ID NO: 489 - DNA, 648 bp, human
atggaaaaactctacagtgaaaatgaaggaatggcttcaaaccaaggaaagatggaaaatgaagaacagccacaagacgagagaaagccagaagtaacttgtactctggaagacaagaagttagaaaacgagggaaagacagaaaacaagggcaaaacaggagatgaggaaatgttaaaggataaaggaaagccagagagtgagggagaggcaaaagaaggaaagtcagagagggagggagagtcagagatggagggaggatcagagagagagggaaaaccagagatagagggaaagccagagagtgaaggagagccagggagtgaaacaagggctgcaggaaagcgcccagctgaggatgatgtacccaggaaagccaaaagaaaaactaataaggggctggctcattacctcaaggagtataaagaggccatacatgatatgaatttcagcaatgaggacatgataagagaatttgacaatatggctaaggtgcaggatgagaagagaaaaagcaaacagaaattgggggcgtttttgtggatgcaaagaaatttacaggaccccttctaccctagaggtccaagggaattcaggggtggctgcagggccccacgaagggacattgaagacattccttatgtgtag

SEQ ID NO: 490 - DNA, 1689 bp, human
atgtcagaaaacagaaaaccgctgctgggctttgtaagcaaactcactagtgggactgcacttgggaactcaggcaagactcactgccccctgtgcttggggcttttcaaagcccccaggctcttgccttgtttgcatacagtttgcaccacgtgtctggagcagctggagcccttctcagtagtggacatccgagggggagactctgacacaagctctgaggggtcaatattccaggaactcaagccacgaagtctgcagtcgcagatcggcatcctttgtcctgtatgtgatgctcaggtggacctgcccatgggtggagtgaaggctttaaccatagaccacctggccgtgaatgatgtgatgctggagagcctacgtggggaaggccagggcctggtgtgtgacctgtgcaacgacagggaagtagagaagaggtgtcagacctgcaaagccaacctctgccacttctgctgccaggctcataggcggcagaagaaaacgacttaccacaccatggtggacctaaaagacttgaaaggctacagccggattgggaagcccatcctgtgtcctgttcaccctgcagaggaactgaggctgttctgtgagttctgtgaccggcccgtgtgccaggattgtgtggtgggggagcatcgggaacacccctgtgacttcaccagcaatgtcatccacaagcatggggactctgtgtgggagctcctcaaaggtactcagccccacgtggaggccctggaggaagccctggctcagatccacataataaacagtgccctccagaagcgagtggaggcagtggcagctgatgtccggacattctcggagggctacattaaggccattgaggagcatcgggacaagctgctgaagcagctggaagacatacgggcccagaaggaaaattccctgcagctgcagaaggcccagctggaacagttactggcagacatgcggactggagtggagttcaccgagcacttgctgaccagcggctcagacttggagatcctcatcaccaagagggtggtggtagaacggctcaggaagctgaacaaagttcaatatagcacccgtcctggagtaaatgataagatacgcttctgtcctcaggagaaagcaggccagtgccgtggctatgaaatttatgacctccacagagcccgggagaaacagacggcctctttcaccctgctttgtaaggatgccgcaggagaaatcatgggcaggggaggagacaacgttcaagttgccgttgtccctaaagataagaaagacagcccagtcagaacaatggtccaggataacaaggatgggacatactacatttcctacacccccaaggaacctggcgtctatactgtgtgggtctgcatcaaagaacagcatgtgcagggctcgccattcactgtgatggtgaggagaaagcaccgcccacactcaggcgtgtttcactgctgcaccttctgctccagcgggggccagaaaaccgctcgctgcgcctgtggaggcaccatgccaggtgggtacctaggctgtggccatggacacaaaggccacccaggtcatccccactggtcatgctgtggaaaatttaatgagaaatctgaatgcacatggacaggtgggcagagcgcaccgaggagtctacttaggactgtggctctctga

SEQ ID NO: 491 - DNA, 1935 bp, human
atggaggccgagcggggtcccgagcgccggcctgcggagcgtagcagcccgggccagacgccggaggagggcgcgcaggccttggccgagttcgcggcgctgcacggcccggcgctgcgcgcttcgggggtccccgaacgttactggggccgcctcctgcacaagctggagcacgaggttttcgacgctggggaagtgtttgggatcatgcaagtggaggaggtagaagaggaggaggacgaggcagcccgggaggtgcggaagcagcagcccaacccggggaacgagctgtgctacaaggtcatcgtgaccagggagagcgggctccaggcagcccaccccaacagcatcttcctcatcgaccacgcctggacgtgccgtgtggagcacgcgcgccagcagctgcagcaggtgcccgggctgctgcaccgcatggccaacctgatgggcattgagttccacggtgagctgcccagtacagaggctgtggccctggtgctggaggagatgtggaagttcaaccagacctaccagctggcccatgggacagctgaggagaagatgccggtgtggtatatcatggacgagttcggttcgcggatccagcacgcggacgtgcccagcttcgccacggcacccttcttctacatgccgcagcaggtggcctacacgctgctgtggcccctgagggacctggacactggcgaggaggtgacccgagactttgcctacggagagacggaccccctgatccggaagtgcatgctgctgccctgggcccccaccgacatgctggacctcagctcttgcacacccgagccgcccgccgagcactaccaggccattctggaggaaaacaaggagaagctgccacttgacatcaaccccgtggtgcacccccacggccacatcttcaaggtctacacggacgtgcagcaggtggccagcagcctcacccacccgcgcttcaccctcacccagagtgaggcggacgccgacatcctcttcaacttctcacacttcaaggactacaggaaactcagccaggagaggccaggcgtgctgctgaaccagttcccctgcgagaacctgctgactgtcaaggactgcctggcctccatcgcgcgccgggcaggtggccccgagggcccaccctggctgccccgaaccttcaacctgcgcactgagctgccccagtttgtcagctacttccagcagcgggaaaggtggggcgaggacaaccactggatctgcaagccctggaacctggcgcgcagcctggacacccacgtcaccaagagcctgcacagcatcatccggcaccgagagagcacccccaaggttgtgtccaagtacatcgaaagtcccgtgttgttccttcgagaagacgtgggaaaggtcaagttcgacatccgctacatcgtgctgctgcggtcagtgaggcccctacggttgttcgtgtatgatgtgttctggctgcggttctccaaccgggcctttgcactcaacgacctggatgactacgagaagcacttcacggtcatgaactatgacccggatgtggtgctgaagcaggtgcactgtgaagagttcatccccgagtttgagaagcaatacccagaatttccctggacggacgtccaggctgagatcttccgggccttcacggagctgttccaggtggcctgtgccaagccaccacccctgggcctctgcgactacccctcatcccgggccatgtatgccgtcgacctcatgctgaagtgggacaacggcccagatggaaggcgggtgatgcagccgcagatcctggaggtgaacttcaaccccgactgtgagcgagcctgcaggtaccaccccaccttcttcaacgacgtcttcagcaccttgtttctggaccagcccggtggctgccacgttacctgccttgtctag

SEQ ID NO: 492 - DNA, 1920 bp, human
atggagcccgcgatggagccggagactctggaggcgcgaatcaatagagccacgaaccccctgaacaaggagctcgactgggccagcatcaacggcttctgcgagcagctcaacgaggactttgaggggcctccactcgccacccggctgctggcccacaagatccagtccccacaggagtgggaggcgatccaggccttgacggtgctggaaacatgcatgaagagctgcggcaagcggttccacgacgaagtgggcaagttccgctttctcaacgagctcatcaaggtcgtgtctcccaagtatctgggctctcggacatcggagaaggtgaagaacaagatcttggagctcctctacagctggacagtgggcctgcccgaggaggtgaaaatcgcagaggcctaccagatgctaaagaagcaggggattgtaaagtccgaccccaagcttccagatgacactacctttccccttcctcctccacggccgaagaatgtgatctttgaagatgaggagaaatccaagatgctggcccgcctgctgaagagctcccatcccgaagacctccgcgcagccaataagctcatcaaagagatggtgcaggaggaccagaagcggatggagaagatctcgaagagggtgaatgccatcgaggaggtgaacaacaatgtgaaactgctcacggagatggtgatgagccacagccagggcggcgcagcagctggcagcagcgaggacctcatgaaggaactgtaccagcgctgtgagcggatgcggcccacgctcttccgactggcgagtgacacagaggacaatgatgaggccttagcggagatcctgcaggccaatgacaacctcacccaggtgatcaacctgtataagcagctggtgcggggtgaggaggtcaacggtgatgccacagccggctccatccctgggagcacctcggccctgctggatctctcaggcctggatctcccgcctgcgggcaccacctacccagctatgcccacccgccctggcgagcaggccagccctgagcagcccagtgcctcagtttccctgcttgacgacgagctcatgtctctgggcctcagtgaccccacacccccttcaggcccaagcctggatggtaccggatggaacagcttccagtcgtcggatgccactgagcccccagcccctgctctggcccaggcccccagtatggaaagccgacccccagcgcagacatccctgccagcaagcagcggtctggacgacctagacctcctggggaagaccctcctgcagcagtcgctgcccccggaatcccagcaagtgcggtgggagaagcagcagccaaccccccggctcacactccgggacctgcagaataagagcagcagctgcagctcccccagctccagcgccaccagccttctccacaccgtgtccccagagccccccaggcctccgcagcagcccgtaccaaccgagctctcactggccagcatcactgtgcccctggagtccatcaaacccagcaacatcctgcccgtgactgtgtatgaccagcacggcttccgcatcctcttccattttgcccgggacccactgccagggcgctccgacgtgctggtggtggtggtttccatgctgagcaccgccccccagcccatccgcaacatcgtgttccagtcagctgtccccaaggttatgaaggtgaagctgcagccaccctcgggcacggagctgccagcttttaaccccatcgtccacccctcagcaatcacccaggtcctgctgcttgccaacccccagaaggagaaggttcgcctccgctacaagctcaccttcaccatgggtgaccagacctacaacgagatgggggatgtggaccagttccccccacctgaaacctggggtagcctctag

SEQ ID NO: 493 - DNA, 1092 bp, human
atggcacctgctggacgcccgggggccaagaaggggattttggagcgcctggagagtggggaggttgtgattggagatggcagctttctcattactctggagaagagaggctatgtgaaggctgggctctggactccagaggcagtgatagaacacccagacgcagttcgtcaacttcacatggaattcttgagagcaggatcaaatgtcatgcagacttttaccttttctgccagtgaggacaatatggaaagcaagtgggaagatgtaaatgctgctgcctgtgacctcgccagggaagtggctggcaaaggtgatgctttggtagcaggggggatctgccagacatcaatatacaaataccagaaggatgaagctagaattaaaaaactttttcgacaacagctagaagtttttgcctggaaaaatgtggacttcttgattgcagagtattttgagcacgttgaagaagctgtgtgggctgtggaagtcttaaaagaatcagatagacccgtggcagttaccatgtgcataggcccagagggagacatgcatgatataacccccggagaatgtgctgtgaggctggtgaaggcaggggcttccatcgttggcgtgaactgccgctttgggcccgacaccagcttgaagacgatggagctcatgaaggagggtcttgagtgggcagggctgaaagcgcacctcatggtgcagcctctggggttccacgcgcctgactgtggcaaagaggggtttgtggatctcccagaatatccctttggactggagtccagagttgccaccagatgggatattcaaaaatacgccagagaggcctacaacctgggggtcaggtacattggcgggtgctgtggatttgagccctaccacatcagggcaattgcagaggagctggccccagaaaggggctttttgccaccagcttcagaaaaacacggcagctggggaagtggtttggacatgcacaccaaaccctggattagagcaagggctcgaagggagtattgggagaatctgctgccagcttcaggcagacctttctgtccttcgctgtcaaagccagacttctaa

SEQ ID NO: 494 - DNA, 4269 bp, human
atgtctggaatcaagcgaaccatcaaagaaaccgaccctgattacgaggatgtatctgtggcccttccaaataagcggcataaagcaattgagaattcagctcgagatgctgctgtgcagaagattgagactattatcaaagaacagtttgctcttgaaatgaagaataaggaacatgaaattgaagtcattgaccagcgactgattgaagcaagaaggatgatggataaactgcgtgcctgcattgtagcaaactactatgcttctgcaggtcttctaaaagtttctgagggatcaaagacatgtgatacaatggtttttaatcatcctgctatcaagaaatttttggaatcaccatctaggtcatcatctcctgccaatcagagagcagaaacaccatcagccaatcattcagaaagtgattctttatctcagcacaatgacttcttatctgacaaagataataacagcaatatggatatagaggaaagactctcaaacaacatggagcagagaccaagccgaaatactggaagggatacttctagaattactggctcccataaaacagaacagcggaatgctgatctcacagatgagacttcacgactttttgtaaagaaaacaatagtagtgggcaatgtgtccaagtatatacctccggataagagggaagaaaatgaccagtcaactcataagtggatggtatatgtccgagggtcccgtagagaacccagcattaatcattttgtcaagaaggtttggttcttccttcatcctagctataaaccaaatgaccttgtggaagttagagagcctccttttcacctgaccagaagaggctggggtgagtttcccgtcagagttcaagttcattttaaggacagccagaacaagcggatagatatcatacataatctgaagctggatagaacttatactggcttgcagactcttggagcagagacggtagtggatgttgaactccatcgccattctctcggagaagactgtatctatcctcagtcctcggagtctgacatctctgatgcccctccatctttgcctttgaccattccagccccagtgaaagcttcttcaccaataaagcagtcacatgagccagtacccgatacctctgtggagaaaggattcccagctagcactgaagctgaacgacacactccgttttatgctttgccatcttcattggaaagaacacccaccaaaatgactacatcccagaaagttaccttttgttcccatggcaattcagctttccagccaatagcatcaagctgcaaaattgttccacaaagtcaggttcctaatcctgagtcacctggaaaatccttccagcccatcaccatgagctgcaagattgtgtcaggttccccaatatcaactccaagcccatcaccattgcctcgaaccccgacttccactccagtccacgtgaagcaaggcactgccggctctgttattaataatccttatgttatcatggacaagcagccggggcaggtgattggagccaccactcccagtacaggaagtcctacaaacaagatctccacggcttctcaggtctcccaaggaacaggttcccctgttcctaaaattcatggaagtagttttgtaacatctactgtcaagcaggaggattctttgtttgcatctatgccacctctttgcccaattgggagtcaccctaaggttcaaagccccaaacctataacaggaggacttggagctttcacaaaagtgatcatcaaacaggaacctggtgaagcccctcacgtgcccgcaacaggagctgccagccagtcaccactcccgcagtatgtgactgtgaaagggggtcacatgatagctgtgtcccctcaaaaacaggtcataactcctggagaagggattgcccagtcagcaaaggttcagccctccaaggttgtcggggtaccagttgggtctgctttaccttcaacagtgaagcaggctgtggcgatcagtggtggccagatcctggtagccaaggccagctcttctgtctccaaagcagttgggccaaagcaagttgtaacccaaggagttgccaaagcaattgtgagtggaggtggaggaaccattgttgctcagccagtgcagaccttaaccaaggcccaggttactgccgctggtcctcagaagagtggatcccagggttcagtaatggcaacgttgcagctaccagccactaatttggccaacttggcaaatttgcctcctggcactaaactctacctaactacaaacagcaagaacccttcaggaaaaggaaaactgctgctgatccctcaaggagccatcctgcgagctacgaacaatgctaatctccagtctggctcagctgccagtggtgggagtggtgccggaggaggaggaggaggaggaggaggaggcggcagtggcagcggtggaggcggcagcacaggaggaggaggaggaacagcaggaggaggaactcaaagtactgctggccctggagggatatctcagcacctgacttacacatcttacatcctcaagcaaactccccagggcacatttttagttggccagccatcaccccagacttctggaaaacaactcaccactgggtcagtggtccaaggaacactgggagtcagcacatcttctgcacaaggacaacaaacgctaaaagtcatctctggacagaaaaccacattgtttacacaggcagcccatggaggacaggcatctctaatgaaaatatccgatagcaccttgaagactgtgccagccacctcacagctctcgaagcctggaaccacaatgctgagagtagcaggaggggttatcacaactgccacttcccctgccgtggccctctcagcaaacggtcctgcacaacagtctgaaggaatggctcccgtgtcttcatctacggtcagttctgtaacgaaaacttctgggcagcagcaagtgtgtgtgagccaggccaccgtgggaacctgcaaggctgccacccccaccgtcgtcagcgccacgtccctcgtgcctacaccaaaccccatctctgggaaagccacagtatccggactgttaaagattcactccagtcagtccagtccgcagcaggccgtcctgacgattcccagccagctcaaaccactcagcgtaaacacatctggaggggtgcagacgatcctgatgcctgtgaataaagtggttcagtcattttctaccagcaagccacctgccattctgcctgtagctgccccaactccagttgtccccagctctgctccagcagctgttgcaaaagtgaagactgaaccagaaacacctggaccgagttgcctctctcaggagggtcagacagcagtgaaaacagaagaaagttctgagctgggaaactatgtcattaagatagaccatttagaaactatccagcaactcctaactgcagtagtaaagaagattccattaatcactgcaaaaagtgaagatgccagctgcttttctgcaaagtctgtggagcagtactatggctggaacattggaaaaaggagagccgctgagtggcaaagagcaatgacaatgcgaaaagtcttacaagaaatcctggagaagaatccgagatttcaccacctgactcccctcaaaaccaagcacatcgctcactggtgccgctgtcatggctacaccccaccggaccctgagagcctgaggaatgacggggactccatcgaggacgtgctgacccagatcgacagcgagcccgagtgcccatcatcattctcctctgctgacaacctctgccgcaaactggaggacctgcaacagttccagaaaagggaacccgagaatgaggaggaggtggacatcctcagcctctccgagccagtgaagataaacatcaagaaggagcaggaagagaaacaagaggaagtcaagttctacctgccaccaaccccagggtctgaatttattggggatgtcacacagaagattgggatcaccctgcagcccgtggcactccacaggaacgtgtatgcgtccgtggtggaggacatgatcctgaaggctacagaacagctggtgaatgatatcctgagacaggctttggcagttggataccagacagcttctcacaacaggattcccaaagaaattacagtgagtaatattcaccaggccatttgcaacattccttttctggacttcctcacaaacaaacacatgggaatattgaatgaggaccagtga

SEQ ID NO: 495 - DNA, 1779 bp, human
atggcgccgccggtggcagagagggggctaaagagcgtcgtgtggcagaagataaaagcaacagtgtttgatgactgcaagaaagaaggcgaatggaagataatgcttttagatgaatttaccactaagcttttggcatcgtgttgcaaaatgacagatcttctagaagaaggtattactgttgtagagaatatttataagaaccgtgaacctgtcagacaaatgaaagctctttatttcatcactccgacatcaaagtctgtagattgtttcttacatgattttgcaagtaaatcggagaacaagtataaagcagcatatatttacttcactgacttttgccctgataatctctttaacaaaattaaggcttcttgctccaagtcaataagaagatgtaaagaaataaatatttccttcattccacatgaatctcaggtgtatactcttgatgtaccagatgcattctattactgttatagtccagaccctggtaatgcaaagggaaaagatgccattatggaaacaatggctgaccagatagttacagtgtgtgccaccttggatgaaaatcccggagtaagatataaaagtaaacctctagataatgccagtaagcttgcacagcttgttgaaaaaaagcttgaagactactacaagattgatgaaaagagcctaataaagggtaaaactcattcacagctcttaataattgatcgtggctttgatcctgtgtccactgtcctgcatgaactgacctttcaggcaatggcatatgatctactaccaattgagaatgatacatacaaatataaaacagatggaaaagaaaaggaggccatccttgaagaagaagatgacctctgggttagaattcgacatcgacatattgcggttgtgttagaggaaattcccaagcttatgaaagaaatttcatcaacaaagaaagcaacagaaggaaagacatcacttagtgctcttacccagctgatgaaaaagatgccccatttccgaaaacagattactaagcaagttgtccatcttaacttagcagaagattgcatgaataagttcaagcttaatatagaaaagctctgcaaaactgaacaggacctggcacttggaactgatgcagaaggacagaaggtgaaagattccatgcgagtactccttccagttctactcaacaaaaatcatgataattgtgataaaataagagcaattctactttatatcttcagtattaatggaactacggaagaaaatttggacaggttgatccagaatgtaaagatagaaaatgagagtgacatgattcgtaactggagttaccttggtgttcccattgttccccaatctcaacaaggcaaaccgttaagaaaggatcggtctgcagaagaaacttttcagctctctcggtggacaccttttatcaaagatattatggaggatgctattgataatagattagattcaaaagaatggccatattgttcccagtgtccagcagtatggaatggttcaggagctgtaagtgctcgccagaaacccagagctaattatttagaagaccgaaaaaatgggtcaaagctgattgtttttgtaattggagggatcacatactctgaagtgcgttgtgcttatgaagtttctcaggcacataaatcctgtgaagttattattggttctacacatgttttaacacccaaaaagctgttggatgatataaagatgctgaataaacccaaggataaagtctccttaattaaagatgaatag

SEQ ID NO: 496 - DNA, 1467 bp, human
atggggcgcccactgcacctcgtcctgctcagtgcctccctggctggcctcctgctgctcggggaaagtctgttcatccgcagggagcaggccaacaacatcctggcgagggtcacgagggccaattcctttcttgaagagatgaagaaaggacacctcgaaagagagtgcatggaagagacctgctcatacgaagaggcccgcgaggtctttgaggacagcgacaagacgaatgaattctggaataaatacaaagatggcgaccagtgtgagaccagtccttgccagaaccagggcaaatgtaaagacggcctcggggaatacacctgcacctgtttagaaggattcgaaggcaaaaactgtgaattattcacacggaagctctgcagcctggacaacggggactgtgaccagttctgccacgaggaacagaactctgtggtgtgctcctgcgcccgcgggtacaccctggctgacaacggcaaggcctgcattcccacagggccctacccctgtgggaaacagaccctggaacgcaggaagaggtcagtggcccaggccaccagcagcagcggggaggcccctgacagcatcacatggaagccatatgatgcagccgacctggaccccaccgagaaccccttcgacctgcttgacttcaaccagacgcagcctgagaggggcgacaacaacctcaccaggatcgtgggaggccaggaatgcaaggacggggagtgtccctggcaggccctgctcatcaatgaggaaaacgagggtttctgtggtggaaccattctgagcgagttctacatcctaacggcagcccactgtctctaccaagccaagagattcaaggtgagggtaggggaccggaacacggagcaggaggagggcggtgaggcggtgcacgaggtggaggtggtcatcaagcacaaccggttcacaaaggagacctatgacttcgacatcgccgtgctccggctcaagacccccatcaccttccgcatgaacgtggcgcctgcctgcctccccgagcgtgactgggccgagtccacgctgatgacgcagaagacggggattgtgagcggcttcgggcgcacccacgagaagggccggcagtccaccaggctcaagatgctggaggtgccctacgtggaccgcaacagctgcaagctgtccagcagcttcatcatcacccagaacatgttctgtgccggctacgacaccaagcaggaggatgcctgccagggggacagcgggggcccgcacgtcacccgcttcaaggacacctacttcgtgacaggcatcgtcagctggggagagggctgtgcccgtaaggggaagtacgggatctacaccaaggtcaccgccttcctcaagtggatcgacaggtccatgaaaaccaggggcttgcccaaggccaagagccatgccccggaggtcataacgtcctctccattaaagtga

SEQ ID NO: 497 - DNA, 1239 bp, human
atggctccagtggagcacgttgtggcggatgctggggctttcctgcggcatgcggctctgcaggacatcgggaagaacatttacaccatccgggaggtggtcactgagattcgggacaaggccacacgcaggcggctcgctgtcctgccctacgagctgcggttcaaggagcccttaccggaatacgtgcggctggtgactgagttttcaaagaaaacaggagactaccccagcctctctgccacggacatccaagtgcttgcactcacataccagttggaagcagagtttgttggggtgtctcacctaaaacaagaaccacagaaggttaaggtgagctcatcgattcagcacccagaaacacctctgcacatttctggtttccatctgccctacaagcctaaacccccacaagaaacagaaaaaggacactcagcttgtgagcctgagaacctggaatttagttccttcatgttctggagaaaccctttgcccaacatcgatcatgaactgcaggagctgctgattgacagaggtgaggacgttccaagtgaggaggaggaggaggaagaaaacgggtttgaagacagaaaagatgacagcgatgacgacgggggtggctggataacccccagtaacatcaagcagatccagcaggagctggagcagtgtgacgtccccgaggacgtgcgggttggctgcctgaccacagacttcgccatgcagaatgttctgctgcagatggggctgcacgtgctggcggtgaacggcatgctgattcgtgaggcccggagctacatcttgcgctgccatggctgtttcaagacaacgtctgacatgagccgagtgttctgctcacactgtgggaacaagaccctgaagaaagtgtccgtgaccgtcagcgacgacggcaccctgcacatgcacttctcccgcaaccccaaggtgctgaacccccgcggcctccggtactcgcttcccactcccaaagggggcaaatacgccatcaacccccatctcaccgaggatcagcgcttccctcagctgcgactctcccaaaaggccaggcagaaaaccaacgtgttcgcccctgactacatcgccggggtgtcaccctttgtcgagaatgacatctccagccgctcagctaccctgcaggtccgggacagcaccttgggagctgggcggagacgcttaaatcccaacgcttccagaaagaagtttgtgaagaaaaggtga

SEQ ID NO: 498 - DNA, 1203 bp, human
atggcctcggagaagccgctggcggcagtcacttgtacagcgccggtcaacatcgcggtcatcaagtactggggcaagcgcgatgaagagctggttctgcccatcaactcctccctgagcgtcactctgcaccaggaccagttaaaaaccaccacaacagccgtcatcagcaaggacttcaccgaggaccggatttggctgaatggccgggaggaggatgtggggcagccgaggctgcaggcctgcctgcgggagatccgctgcctggcccggaagcggaggaactcacgggatggggacccgctgccctccagcctcagctgcaaggtgcacgtggcatcggtgaacaacttccccacggctgcgggcctggcctcctcagcggcgggctatgcctgcctagcctacaccctggcccgtgtctacggcgtggagagtgacctctcagaagtggctcgccggggctcaggcagcgcctgccggagcctgtatgggggctttgtggagtggcagatgggagagcaggccgacgggaaggacagcatcgctcggcaagtggcccccgagtcacactggcctgaactccgcgtgctcatccttgtggtgagcgctgagaagaagctgacaggcagtaccgtgggcatgcgggccagtgtggagaccagccccctgcttcggttccgggccgagtccgtggtgcccgcgcgcatggcggagatggcccgctgcatccgggagcgagacttccccagcttcgcccagctgaccatgaaggacagcaaccagttccacgccacctgcctcgacaccttcccgcccatctcttacctcaatgccatctcctggcgcatcatccacctggtgcaccgcttcaacgcccaccacggggacaccaaggtggcgtacacctttgacgcgggccccaatgccgtgatcttcaccctggacgacactgtggctgagtttgtggctgctgtgtggcacggctttcccccaggctcgaatggagacacgtttctgaaggggctgcaggtgaggccggcccctctctcagctgagcttcaggctgcgctggccatggagccgacccccggtggggtcaaatacatcattgtcactcaggtggggccagggcctcaaatcctggatgacccctgcgcccacctcctgggtcctgacggcctgccgaagccagctgcctga

SEQ ID NO: 499 - DNA, 6693 bp, human
atgttcaagaaactgaagcaaaagatcagcgaggagcagcagcagctccagcaggcgctggctcctgctcaggcgtcctccaattcttcaacaccaacaagaatgaggagcaggacatcttcatttacagagcaacttgatgaaggtacacccaatagagagtcaggtgacacacagtcttttgcacagaagctccagctccgggtgccctccgtggagtctttgtttcgaagtccgataaaggaatctctattccggtcttcttctaaagagtctttggtacgaacatcttccagagaatccctgaatcgacttgacctggacagttctactgccagttttgatccaccctctgatatggatagcgaggctgaagacttggtagggaattcagacagtctcaacaaagaacagttgattcagcggttgcgaagaatggaacgaagcttaagtagctacaggggaaaatattctgagcttgttacagcttatcagatgcttcagagagagaagaaaaagctacaaggtatattaagtcagagtcaggataaatcacttcggagaatagcagaattaagagaggagctccaaatggaccagcaggcaaagaaacatctgcaagaggagtttgatgcatctttagaggagaaagatcagtatatcagtgttctccaaactcaggtttctctactgaaacaacgattacgaaatggcccgatgaatgttgatgtactgaaaccacttcctcagctggaaccacaggctgaagtcttcactaaagaagagaatccagaaagtgatggagagccagtagtggaagatggaacttctgtaaaaacactggaaacactccagcaaagagtgaagcgtcaagagaacctacttaagcgttgtaaggaaacaattcagtcacataaggaacaatgtacactattaactagtgaaaaagaagctctgcaagaacaactggatgaaagacttcaagaactagaaaagataaaggaccttcatatggccgagaagactaaacttatcactcagttgcgtgatgcaaagaacttaattgaacagcttgaacaagataagggaatggtaatcgcagagacaaaacgtcagatgcatgaaaccctggaaatgaaagaagaagaaattgctcaactccgtagtcgcatcaaacagatgactacccagggagaggaattacgggaacagaaagaaaagtccgaaagagctgcttttgaggaacttgaaaaagctttgagtacagcccaaaaaacagaggaagcacggagaaaactgaaggcagaaatggatgaacaaataaaaactatcgaaaaaacaagtgaggaggaacgcatcagtcttcaacaggaattaagtcgggtgaaacaggaggttgttgatgtaatgaaaaaatcctcagaagaacaaattgctaagctacagaagcttcatgaaaaggagctggccagaaaagagcaggaactgaccaagaagcttcagacccgagaaagggaatttcaggaacaaatgaaagtagctcttgaaaagagtcaatcagaatatttgaagatcagccaagaaaaagaacagcaagaatctttggccctagaagagttagagttgcagaaaaaagcaatcctcacagaaagtgaaaataaacttcgggaccttcagcaagaagcagagacttacagaactagaattcttgaattggaaagttctttggaaaaaagcttacaagaaaacaaaaatcagtcaaaagatttggctgttcatctggaagctgaaaaaaataagcacaataaggagattacagtcatggttgaaaaacacaagacagaattggaaagccttaagcatcagcaggatgccctttggactgaaaaactccaagtcttaaagcaacaatatcagactgaaatggaaaaacttagggaaaagtgtgaacaagaaaaagaaacattgttgaaagacaaagagattatcttccaggcccacatagaagaaatgaatgaaaagactttagaaaagcttgatgtgaagcaaacagaactagaatcattatcttctgaactgtcagaagtattaaaagcccgtcacaaactagaagaggaactttctgttctgaaagatcaaacagataaaatgaagcaggaattagaggccaagatggatgaacagaaaaatcatcaccagcagcaagttgacagtatcattaaagaacacgaggtatctatccagaggactgagaaggcattaaaagatcaaattaatcaacttgagcttctcttgaaggaaagggacaagcatttgaaagagcatcaggctcatgtagaaaatttagaggcagatattaaaaggtctgaaggggaactccagcaggcatctgctaagctggacgtttttcagtcttaccagagtgccacacatgagcagacaaaagcatatgaggaacagttggcccaattgcagcagaagttgttggatttggaaacagaaagaattcttcttaccaaacaggttgctgaagttgaagcacaaaagaaagatgtttgtactgagttagatgctcacaaaatccaggtgcaggacttaatgcagcaacttgaaaaacaaaatagtgaaatggagcaaaaagtaaaatctttaacccaagtctatgagtccaaacttgaagatggtaacaaagaacaggaacagacaaagcaaatcttggtggaaaaggaaaatatgattttacaaatgagagaaggacagaagaaagaaattgagatactcacacagaaattgtcagccaaggaggacagtattcatattttgaatgaggaatatgaaaccaaatttaaaaaccaagaaaaaaagatggaaaaagttaagcagaaagcaaaggagatgcaagaaacgttaaagaaaaaattactggatcaggaagccaaacttaagaaagagcttgaaaatactgctctagagcttagtcagaaagaaaaacagtttaatgccaaaatgctggaaatggcacaggctaactcagctggaatcagtgatgcagtgtcaagactggaaacaaaccaaaaagaacaaatagaaagtcttactgaggttcatcgacgagaactcaatgatgtcatatcaatctgggaaaagaaacttaatcagcaagctgaagaacttcaggaaatacatgaaatccaattacaggaaaaagaacaagaggtagcagaactgaaacaaaagatcctcctatttgggtgtgaaaaagaagagatgaacaaggaaataacatggctgaaggaagaaggtgttaagcaggatacaacattaaatgaattacaggaacagttaaagcagaagtctgcccatgtgaattctcttgcacaagatgaaactaaactgaaagctcatcttgaaaagctagaggttgacttgaataagtctctgaaggaaaatacttttcttcaagagcagctagttgaactgaagatgctggcagaagaagataagcggaaggtttctgagttgactagcaagttgaaaaccacagatgaagaattccagagtttgaaatcttcacatgaaaaaagtaacaaaagcctagaggacaagagcttggaatttaaaaaactgtctgaggaactagcgattcagctagatatttgctgtaagaaaaccgaagccttattagaagctaaaacaaatgagctaatcaacattagtagtagtaaaactaatgccattctttctaggatttctcattgtcagcaccgtacaactaaagttaaggaggcactgttaattaaaacttgcacagtttctgaattagaagcacaacttagacagttgacagaggagcaaaatacactaaatatttcttttcaacaggctactcatcagttagaagaaaaagaaaatcaaattaagagcatgaaggctgatattgaaagtcttgtaacagaaaaagaagccttacagaaggaaggaggcaatcagcaacaggctgcttctgaaaaggagtcttgtataacacagttgaagaaagagttatctgaaaacatcaatgctgtcacattgatgaaagaagagcttaaagaaaaaaaagttgagattagcagtcttagtaaacaactaactgatttgaatgttcagcttcaaaatagcatcagcctatccgaaaaagaagcagccatttcatcactaagaaagcagtatgatgaagaaaaatgtgaattgctggatcaggtgcaagatttatcttttaaagttgacactctgagtaaagagaaaatttctgctcttgagcaggtagatgactggtccaataaattctcagaatggaagaagaaagcacagtcaagatttacacagcatcaaaacactgttaaagaattgcagatccagcttgagttaaaatcaaaggaagcttatgaaaaggatgagcagataaatttattgaaggaagagcttgatcagcaaaataaaagatttgattgtttaaagggtgaaatggaagacgacaagagcaagatggagaaaaaggagtctaatttagaaacagagttaaagtctcaaacagcaagaattatggaattagaggaccatattacccagaaaactattgaaatagagtccttaaatgaagttcttaaaaattacaatcaacaaaaggatattgaacacaaagaattggttcagaaacttcaacattttcaagagttaggagaagaaaaggacaacagggttaaagaagctgaagaaaaaatcttaacacttgaaaaccaagtttattccatgaaagctgaacttgaaactaagaagaaagaattagaacatgtgaatttaagtgtgaaaagcaaagaggaggagttaaaggcattggaagataggcttgagtcagaaagtgctgcaaaattagcagagttgaagagaaaagctgaacaaaaaattgctgccattaagaagcagttgttatctcaaatggaagagaaagaagaacagtataaaaaaggtacagaaagccatttgagtgagctaaatacaaaattgcaggaaagagaaagggaagttcacatcttggaagaaaaacttaagtcagtggaaagttcacagtcagaaacattaattgtacccagatcagcaaaaaatgtggcagcatatactgaacaagaagaagcagattcccaaggctgtgtgcagaagacatatgaagaaaaaatcagtgttttacaaagaaacttaactgaaaaagaaaagctattgcagagggtagggcaggaaaaagaagagacagtttcttctcattttgaaatgcgatgccaataccaggagcgcttaataaagctagaacatgctgaggcaaagcaacatgaagatcaaagtatgataggtcatcttcaagaggagcttgaagaaaaaaacaagaaatattccttgatagtagcccagcatgtggaaaaagaaggaggtaaaaataacatacaggcaaagcaaaacttggaaaatgtgtttgacgacgtccagaaaaccctccaggagaaggaactaacctgtcagattttggagcaaaagataaaagagctggattcctgcttagtaagacagaaagaagtacatagagttgaaatggaagagttgacctcaaaatatgaaaaattacaggctttacaacagatggatggaagaaataaacccacagaacttttggaagaaaacactgaagaaaagtccaaatcacatttggtccaacccaaattgcttagtaacatggaagcccagcacaatgatctggagtttaaattagccggggcagaacgggagaaacagaaactgggcaaggagattgttagattgcagaaagaccttcgaatgttgagaaaggagcatcagcaagaattggaaatactaaagaaagaatatgatcaagaaagggaagagaaaatcaaacaggagcaggaagatcttgaactgaagcacaattccacattaaaacagctgatgagggagtttaatacacagctggcacaaaaggaacaagagctggaaatgaccataaaagaaactatcaataaggcccaggaggtggaggctgaacttttagaaagccatcaagaagagacaaatcagttacttaaaaaaattgctgagaaagatgatgatctaaaacgaacagccaaaagatatgaagaaatccttgatgctcgtgaagaagaaatgactgcaaaagtaagggacctgcagactcaacttgaggagctgcagaagaaataccagcaaaagctagagcaggaggagaaccctggcaatgataatgtaacaattatggagctacagacacagctagcacagaagacgactttaatcagtgattcgaaattgaaagagcaagagttcagagaacagattcacaatttagaagaccgtttgaagaaatatgaaaagaatgtatatgcaacaactgtggggacaccttacaaaggtggcaatttgtaccatacggatgtctcactctttggagaacctaccgaatttgagtatttgcgaaaagtgctttttgagtatatgatgggtcgtgagactaagaccatggcaaaagttataaccaccgtactgaagttccctgatgatcagactcagaaaattttggaaagagaagatgctcggctgatgtttacttcacctcgcagtggtatcttctga

SEQ ID NO: 500 - DNA, 4734 bp, human
atggaggctggctcagtggttcgagccatttttgacttctgccctagcgtatcagaagaactgccgctctttgtgggagatattattgaggtgctggcagtggtggatgaattttggcttctaggaaagaaggaggatgttacaggacaattccccagcagttttgtggaaattgtgaccattcccagtctaaaagagggagagaggctgtttgtgtgcatttgtgaattcacatcccaagagttggataatcttcccctccatcgaggtgacctggtgattctcgatggcattcccactgcaggctggctgcagggccgaagctgctggggcgcacggggcttcttcccatcttcatgtgtccgcgagctctgcctctcctcacagagccggcagtggcactcccagagcgccctgtttcagattccggaatattccatgggacaagcccgggccctaatggggctttctgctcagctggatgaagagctggacttcagggaaggggatgtgatcaccattattggagttcctgaaccaggctggtttgaaggggagttagagggccgaagaggcatttttccagaaggttttgtagagctgttggggcccctgaggactgtggatgagtcagtaagttctggaaatcaagatgactgcattgttaatggtgaagtagatacccctgtaggagaagaagagatagggccggatgaggatgaggaggagccagggacctatggggtcgccctgtacagattccaagccctggagccaaatgagctggatttcgaggtcggggataaaatccgaattctggcgaccttggaagatggctggctggaaggatccctgaagggcaggacaggcatctttccttaccggtttgtgaaattatgtcctgacacacgggtggaggaaaccatggctctgccccaggaaggcagccttgccaggatcccggaaacttctttggattgtttggagaacaccttaggagtagaggaacaaagacatgaaaccagtgaccatgaggccgaggagcctgactgcattatttctgaagcacccacttctcccctcggtcatctgacttcagagtatgacacagacagaaactcttatcaggacgaggacaccgcaggagggcccccgagaagcccaggcgtggagtgggaaatgcctcttgccacagactctcccacatctgaccctacagaagtagtcaatggtatttcctcccaacctcaggtcccttttcatcccaacttgcagaaaagccagtattattctacagtgggagggagccacccgcactcagaacagtaccccgaccttcttcccctagaagcaaggactagagactatgccagcctacctcccaaaagaatgtattcccagctaaaaactcttcagaagccagtgctccctctttacaggggctcttctgtttcagcttcaagggtagtcaaacccagacaatcaagtcctcagctccacaacctagcaagttatactaaaaagcaccacacgtccagtgtttactccatctcagagagattggagatgaagcctggtccgcaagcccaagggcttgttatggaagcagcaacacattcacagggagacggcagcactgacctggactcgaagctgacacaacagctgatcgagtttgagaagagcttggcagggcccggcacagagccagataaaattttacgccacttttcaatcatggactttaactctgagaaggatattgtccgaggttcctcaaagttaatcaccgagcaggagctgccggaaaggagaaaggccctaaggccaccgccacctcgtccctgtactccggtatccacttctccccatttgctggttgaccagaacctaaaacctgcaccacccttggtggtgcgaccctctcgcccagctcccctgcctccctcagcacagcagagaacgaatgcggtatcccccaagctcctatctcgacaccgtcctacctgtgagaccttagaaaaggagggccctggtcatatgggaaggagtctggaccagacctccccatgccccttagtgctggtgaggattgaggaaatggagcgggacttggatatgtacagtagagctcaagaagagctaaacctcatgctggaggagaagcaggatgaatcatcaagagcagagaccctcgaggatctcaagttctgtgaaagtaacattgaaagtttgaatatggaactccagcaactaagagaaatgacgctcctctcctcccagtcttcatcactggtggccccttctgggtctgtgtctgccgaaaatccagagcagaggatgctggagaagagagccaaggtcatagaagaacttcttcagacagaaagagactacattcgggatctggaaatgtgtattgagcggatcatggtacccatgcagcaggcacaggtaccaaacattgattttgagggactttttggaaatatgcagatggtgattaaggtctcgaagcaattattggctgctctggaaatcagcgatgctgtaggacctgtgtttcttggtcaccgggatgagcttgagggaacatacaagatttactgccagaatcatgatgaggccattgcgctgcttgaaatctacgagaaggatgagaagatccagaagcatcttcaggactccttggcagatctgaagagcctatacaacgaatggggatgcacaaattatattaacctgggctccttcctcatcaaaccagtacagagagtaatgcgttacccgctgttgctaatggagttgctgaattccaccccagaatcccacccagataaagtgcctttaaccaatgcagtccttgcggtcaaggaaatcaacgttaacattaatgaatataaacggcgaaaggacctggtcctcaagtaccgtaagggtgatgaagatagccttatggagaaaatttccaaactgaacatccactccatcatcaagaaatccaaccgagttagcagtcacctgaagcatctcactggctttgctcctcagataaaagatgaagtatttgaagaaacagaaaaaaacttccgaatgcaagaaagattgattaagtcttttatccgagacctgtctctctacctccagcacatccgggagtccgcatgtgtgaaagtggtggctgctgtgagcatgtgggatgtgtgcatggagagaggacaccgggacctggagcagtttgagagggtgcatcgctacatcagtgaccagctcttcacaaactttaaggagaggacagagcggcttgtcatctcccccttaaatcagttactgagcatgtttacagggccccataagctggtacagaaacgctttgacaagctcctggacttctataactgtacagaacgggcagaaaagctaaaggacaagaagaccctggaggagctgcagtcggcccggaacaactatgaggccctgaatgcacagctgctggatgagctgcccaagttccaccagtacgcccagggcctcttcaccaactgtgtccacggctatgctgaagcccactgtgactttgtgcaccaggctctggagcaattaaagccactgctttcgttactcaaagtggctggcagagagggaaaccttattgccatcttccacgaagagcacagcagagttctgcagcaactccaggtttttaccttcttcccggagtctcttccagctaccaagaagccatttgagaggaaaaccattgaccgccagtctgctcgaaagccactcctgggcctgccaagttacatgctacagtcagaagaactccgggcctccctcctggccaggtatccccctgaaaaactcttccaggcagaacggaacttcaatgctgctcaagacttggatgtctcacttttggaaggtgacctggtgggtgtgattaagaaaaaagaccccatgggcagccagaaccgctggctgattgacaatggagtcaccaaaggcttcgtgtacagctctttcctaaagccctacaatcctcgccgcagccactccgatgcctccgtgggtagccactcctccacagagtctgagcacggcagctcctcccccaggttcccacgccagaacagcggcagcaccctgaccttcaaccccagcagcatggctgtatcctttacctcggggtcttgccagaagcagcctcaagatgcatctcctccgccaaaagaatgtgaccaaggaactctcagtgcatccctaaatccgagtaattcagagagtagtccttccagatgcccttcagacccagactccacctcccagccaaggtcaggggactctgcagatgtagctagagatgtaaagcaacccactgccacgccgaggagctaccggaacttcaggcatccagaaatagttggctactccgtaccaggacgaaatgggcaaagtcaagacctcgtcaaaggatgtgcaagaacagcccaggctccggaagacagaagtacagagccagatggcagtgaggcagaaggcaaccaggtctattttgctgtctacaccttcaaggcacgaaacccaaatgagctgagcgtgtcagccaatcagaaactcaagatcctcgagtttaaagatgttacaggaaatacagagtggtggttagctgaggttaacgggaagaagggctacgttccctccaattatatccgcaaaaccgagtacacctga

SEQ ID NO: 501 - DNA, 984 bp, human
atgcagatgagattgaggtctgggggcactgagggtctcttggctgaaaaattggaggctttgatcactcagactcgagccaaacaggcagctaccatgagtgaagtggagtggagagggagaacggttccagtgaagattgacaaagtgcgcattttcttattaggactggctgataacgaagcagctattgtccaggctgaaagcgaagaaactaaggagcgcctgtttgaatcaatgctcagcgagtgtcgggacgccatccaggtggttcgggaggagctcaagccagatcagaaacagagagattatatccttgaaggagagccagggaaggtgtctaatcttcaatacttgcatagctacctgacttacatcaagctatcaacggcaatcaagcgtaatgagaacatggccaaaggtctgcagagggctctgctgcagcagcagccagaggatgacagcaagcgctcaccccggccccaggacctgatccgactctatgacatcatcttacagaatctggtggaattgctccagcttcctggtttagaggaagacaaagccttccagaaagagataggcctcaagactctggtgttcaaagcttacaggtgttttttcattgctcagtcctatgtgctggtgaagaagtggagcgaagcccttgtcctgtatgacagagtcctgaaatatgcaaatgaagtaaattctgatgctggcgccttcaagaacagcctaaaggacctgcctgatgtgcaagagctcatcactcaagtgcggtcagagaagtgctccctgcaggccgcagccatccttgatgcaaacgacgctcatcaaacagagacctcctcctcccaagtcaaggacaataagcctctggttgaacggtttgagtccacaccaggcacagatggggccttgaaacgctttgtcatgcttcttcagtaccatggatttgaaatgaactcatccttgctgtga

SEQ ID NO: 502 - DNA, 627 bp, human
atgcctcccaagaaggatgttcccgtgaagaaaccagcagggccctccatctccaaacctgctgctaagccagcagcagcaggggctcctccagccaagaccaaagctgagccagctgtcccccaggcccctcagaaaacccaggagcctccagtcgatctctccaaagtggtgatcgagtttaacaaggaccagctggaggagttcaaggaggccttcgagctgtttgaccgagtgggggatggcaagatcctgtacagccagtgtggggacgtgatgagggccctgggccagaaccccaccaacgccgaggtgctcaaggtcctggggaaccccaagagtgatgagctgaagtcgcggcgtgtggactttgagactttcctgcccatgctccaggcagtggccaagaaccgaggccaaggcacatatgaggactacttggaggggtttcgtgtgtttgacaaggaggggaacggcaaagtcatgggagcagagctcagacatgttctcaccacccttggagagaagatgactgaggaggaggtggagaccgttctggcaggacacgaggacagcaacggctgcatcaactacgaggccttcttgaaacacatcctaagcgtctga

SEQ ID NO: 503 - DNA, 552 bp, human
atgagagagtacaaagtggtggtgctgggctcgggcggcgtgggcaagtccgcgctcaccgtgcagttcgtgacgggctccttcatcgagaagtacgacccgaccatcgaagacttttaccgcaaggagattgaggtggactcgtcgccgtcggtgctggagatcctggatacggcgggcaccgagcagttcgcgtccatgcgggacctgtacatcaagaacggccagggcttcatcctggtctacagcctcgtcaaccagcagagcttccaggacatcaagcccatgcgggaccagatcatccgcgtgaagcggtacgagcgcgtgcccatgatcctggtgggcaacaaggtggacctggagggtgagcgcgaggtctcgtacggggagggcaaggccctggctgaggagtggagctgccccttcatggagacgtcggccaaaaacaaagcctcggtagacgagctatttgccgagatcgtgcggcagatgaactacgcggcgcagcccaacggcgatgagggctgctgctcggcctgcgtgatcctctga

SEQ ID NO: 504 - DNA, 1455 bp, human
atgtatgacgactcctacgtgcccgggtttgaggactcggaggcgggttcagccgactcctacaccagccgcccatctctggactcagacgtctccctggaggaggaccgggagagtgcccggcgtgaagtagagagccaggctcagcagcagctcgaaagggccaagcacaaacctgtggcatttgcggtgaggaccaatgtcagctactgtggcgtactggatgaggagtgcccagtccagggctctggagtcaactttgaggccaaagattttctgcacattaaagagaagtacagcaatgactggtggatcgggcggctagtgaaagagggcggggacatcgccttcatccccagcccccagcgcctggagagcatccggctcaaacaggagcagaaggccaggagatctgggaacccttccagcctgagtgacattggcaaccgacgctcccctccgccatctctagccaagcagaagcaaaagcaggcggaacatgttcccccatatgacgtggtgccctccatgcggcctgtggtgctggtgggaccctctctgaaaggttatgaggtcacagacatgatgcagaaggctctcttcgacttcctcaaacacagatttgatggcaggatctccatcacccgagtcacagccgacctctccctggcaaagcgatctgtgctcaacaatccgggcaagaggaccatcattgagcgctcctctgcccgctccagcattgcggaagtgcagagtgagatcgagcgcatatttgagctggccaaatccctgcagctagtagtgttggacgctgacaccatcaaccacccagcacagctggccaagacctcgctggcccccatcatcgtctttgtcaaagtgtcctcaccaaaggtactccagcgtctcattcgctcccgggggaagtcacagatgaagcacctgaccgtacagatgatggcatatgataagctggttcagtgcccaccggagtcatttgatgtgattctggatgagaaccagctggaggatgcctgtgagcacctggctgagtacctggaggtttactggcgggccacgcaccacccagcccctggccccggacttctgggtcctcccagtgccatccccggacttcagaaccagcagctgctgggggagcgtggcgaggagcactccccccttgagcgggacagcttgatgccctctgatgaggccagcgagagctcccgccaagcctggacaggatcttcacagcgtagctcccgccacctggaggaggactatgcagatgcctaccaggacctgtaccagcctcaccgccaacacacctcggggctgcctagtgctaacgggcatgacccccaagaccggcttctagcccaggactcagagcacaaccacagtgaccggaactggcagcgcaaccggccttggcccaaggatagctactga

SEQ ID NO: 505 - DNA, 344 bp, human
agcctggggatgccgtagctgcggccgagcagcctgcccagtgtgggcaggggcagccgttcgtgctgcccgtgggcgtgagctccaggaatgaggactacccccgaacctgcaggatgtgtttttatggcacaggcctcatcgcgggccacggcttcaccagccctgaacgcacccccggggtcttcatcctcttcgatgaggaccgcttcgggttcgtctggctggagctgaaatccttcagcctgtacagccgggtccaggccaccttccggaacgcagatgcgccgtccccacaggccttcgatgagatgctcaagaacattcagtccctcacctcctga

SEQ ID NO: 506 - DNA, 3372 bp, human
atgtggggggattctcgacctgctaacagaactggaccttttcgtgggagccaagaagaaaggtttgctcccgggtggaacagggattatcctcctcctccccttaagagtcatgctcaagagagacactctggcaactttcctggcagagattcacttccctttgatttccaggggcattcggggcctccttttgcaaatgtagaggagcattctttcagctatggagctagagacggaccgcatggtgactatcgaggaggggagggacctggacatgatttcagggggggagatttttcgtcttctgatttccagagcagagattcatcacagttggacttcaggggtagggacatacattctggggattttcgggatagagaaggaccacctatggactataggggtggagatggtacttctatggattatagaggtagggaggcacctcatatgaactacagagacagggatgctcacgctgttgacttcagaggtagggatgctcctccatctgacttcaggggccggggcacttatgatttagattttagaggccgggatggatcccatgcagattttaggggaagggatttatcagatttggattttagggccagagaacagtcccgttctgattttaggaatagagatgtatctgatttggactttagagacaaagacggaacacaagtagactttagaggccgaggttcaggtactactgatctagactttagggacagggatacgccacattcagatttcagaggtagacaccgatctaggactgatcaggattttaggggcagagagatgggatcttgtatggaatttaaagatagggagatgccccctgtggatccaaatattttggattacattcagccctctacacaagatagagaacattctggtatgaatgtgaacaggagagaagaatccacacatgaccatacgatagaaaggcctgcttttggcattcagaagggagaatttgagcattcagaaacaagagaaggagaaacacaaggtgtagcctttgaacatgagtctccagcagactttcagaacagccaaagtccagttcaagaccaagataagtcacagctttctggacgtgaagagcagagttcagatgctggtctgtttaaagaagaaggcggtctggactttcttgggcggcaagacaccgattacagaagcatggagtaccgtgatgtggatcataggctgccaggaagccagatgtttggctatggccagagcaagtcttttccagagggcaaaactgcccgagatgcccaacgggaccttcaggatcaagattataggaccggcccaagtgaggagaaacccagcaggcttattcgattaagtggggtacctgaagatgccacaaaagaagagattcttaatgcttttcggactcctgatggcatgcctgtaaagaacttgcagttgaaggagtataacacaggttacgactatggctatgtctgcgtggagttttcactcttggaagatgccatcggatgcatggaggccaaccagggaactctaatgatccaggacaaagaagttaccctggagtatgtatcaagcctggatttttggtactgcaaacgatgtaaggcaaacattggtgggcaccgatcttcctgttcattctgcaagaacccaagagaagtgacagaggccaagcaagaattaataacctaccctcagcctcagaaaacatccataccagcaccattggaaaaacagcccaaccagcccctaagaccagctgataaggaacctgaacccaggaagagggaagaaggccaagagtcacgcttaggacatcaaaagagagaagcagaaaggtatctgcctccttctcgaagggaagggccaactttccgaagagaccgagagagggagtcatggtctggagagacacgccaggatggagagagcaaaactatcatgctaaagcgtatctatcgttccacaccacctgaggtgatagtggaagtgctggagccctatgtccgccttactactgccaacgtccgtatcatcaagaacagaacaggccctatggggcatacctatggctttattgacctcgactcccatgcggaagctcttcgtgtggtgaagatcttacagaaccttgatccgccatttagcattgatgggaagatggtagctgtaaacctggccactggaaaacgaagaaatgattctggggaccattctgaccacatgcattactatcagggtaaaaaatatttccgagataggaggggaggtggcagaaattcagactggtcttcagatacaaatcgacaaggacaacagtcatcatctgactgctacatatatgattctgctactggctactattatgaccccttggcaggaacttattatgaccccaatacccagcaagaagtctatgtgccccaggatcctggattacctgaggaagaagagatcaaggaaaaaaaacccaccagtcaaggaaagtcaagtagcaagaaggaaatgtctaaaagagatggcaaggagaaaaaagacagaggagtgacgaggtttcaggaaaatgccagtgaagggaaggcccctgcagaagacgtctttaagaagcccctgcctcctactgtgaagaaggaagagagtccccctccacctaaagtggtaaacccactgatcggcctcttgggtgaatatggaggagacagtgactatgaggaggaagaagaggaggaacagacccctcccccacagccccgcacagcacagccccagaagcgagaggagcaaaccaagaaggagaatgaagaagacaaactcactgactggaataaactggcttgtctgctttgcagaaggcagtttcccaataaagaagttctgatcaaacaccagcagctgtcagacctgcacaagcaaaacctggaaatccaccggaagataaaacagtctgagcaggagctagcctatctggaaaggagagaacgagagggaaagtttaaaggaagaggaaatgatcgcagggaaaagctccagtcttttgactctccagaaaggaaacggattaagtactccagggaaactgacagtgatcgtaaacttgttgataaagaagatatcgacactagcagcaaaggaggctgtgtccaacaggctactggctggaggaaagggacaggcctgggatatggccatcctggattggcttcatcagaggaggctgaaggccggatgaggggccccagtgttggagcctcaggaagaaccagcaaaagacagtccaacgagacttaccgagatgctgttcgaagagtcatgtttgctcgatataaagaactcgattaa

SEQ ID NO: 507 - DNA, 399 bp, human
atggtggaggctttctgtgctacctggaagctgaccaacagtcagaactttgatgagtacatgaaggctctaggcgtgggctttgccactaggcaggtgggaaatgtgaccaaaccaacggtaattatcagtcaagaaggagacaaagtggtcatcaggactctcagcacattcaagaacacggagattagtttccagctgggagaagagtttgatgaaaccactgcagatgatagaaactgtaagtctgttgttagcctggatggagacaaacttgttcacatacagaaatgggatggcaaagaaacaaattttgtaagagaaattaaggatggcaaaatggttatgacccttacttttggtgatgtggttgctgttcgccactatgagaaggcataa

SEQ ID NO: 508 - DNA, 747 bp, human
atgtcgggaggtggtgtgattcgtggccccgcagggaacaacgattgccgcatctacgtgggtaacttacctccagacatccgaaccaaggacattgaggacgtgttctacaaatacggcgctatccgcgacatcgacctcaagaatcgccgcgggggaccgcccttcgccttcgttgagttcgaggacccgcgagacgcggaagacgcggtgtatggtcgcgacggctatgattacgatgggtaccgtctgcgggtggagtttcctcgaagcggccgtggaacaggccgaggcggcggcgggggtggaggtggcggagctccccgaggtcgctatggccccccatccaggcggtctgaaaacagagtggttgtctctggactgcctccaagtggaagttggcaggatttaaaggatcacatgcgtgaagcaggtgatgtatgttatgctgatgtttaccgagatggcactggtgtcgtggagtttgtacggaaagaagatatgacctatgcagttcgaaaactggataacactaagtttagatctcatgagggagaaactgcctacatccgggttaaagttgatgggcccagaagtccaagttatggaagatctcgatctcgaagccgtagtcgtagcagaagccgtagcagaagcaacagcaggagtcgcagttactccccaaggagaagcagaggatcaccacgctattctccccgtcatagcagatctcgctctcgtacataa

SEQ ID NO: 509 - DNA, 1485 bp, human
atgccgcgggtgtacatcggccgcctgagctaccaggcccgggagcgcgatgtggagcgcttctttaagggctacgggaagatcctggaggtggatctgaagaacggatatggttttgtggagtttgatgatctgcgtgatgcagatgatgctgtttatgaactgaatggcaaagacctttgtggtgagcgagtaattgttgagcatgcccgcggcccacggcgagatggcagttacggttctggacgcagtggatatggttatagaagaagtggccgagataaatatggccctcctactcgcacagagtacagacttattgtggagaatttgtcaagtcggtgcagctggcaagacctaaaggattatatgcgtcaggcaggagaagtgacttatgcagatgctcacaagggacgcaaaaatgaaggggtgattgaatttgtatcttattctgatatgaaaagagctttggaaaagttggatggaactgaagtcaatgggagaaaaatcagattagttgaagacaagccaggttccagacgacgccggtcctactccagaagccggagtcattcaaggtctcgctctcgaagcagacattcccgtaagagcagaagccgaagtggcagcagcaaaagcagtcattctaagagtagatctcggtccaggtcgggctcccgctcccggagcaagagccggagccggagccagagtcggagccggagcaagaaagagaaaagcaggagccccagcaaggaaaagagccgcagccgcagccatagcgctggcaagagccgcagcaagagcaaagaccaagctgaagagaagatccaaaacaatgacaatgtcgggaaacccaagagccggagtcctagcaggcataaaagtaagagcaaaagtcggagcaggagtcaggagaggagagtggaggaggagaagcgagggagtgtgagcaggggcaggagccaggagaagagcctccgccagagtcggagccggagcaggagcaaagggggcagcaggagccggagcaggagccgcagcaagagcaaggacaagaggaagggcaggaagagaagcagagaggagagccgcagtcgcagtcgcagccgcagcaagagtgagaggagcagaaagcgaggcagcaagcgagacagcaaggcgggcagcagcaagaagaagaagaaggaagacactgaccgctcccagtccagatctccatcccgctccgtgtcaaaggagcgggaacatgccaagtctgaatccagccagagggaaggtcgaggagagagtgagaatgctggcaccaatcaggagacccggtccaggtcgagatccaattccaaatcgaaaccaaaccttccatcagaatcacgctccagatcaaagtcagcttcaaaaacccgatctcggtccaagtctagatccaggtctgcttccagatcgccctcccgatctagatctaggtcccactcaaggtcctaa

SEQ ID NO: 510 - DNA, 2058 bp, human
atgcagatcttcgtgaagactctgactggtaagaccatcaccctcgaggttgagcccagtgacaccatcgagaatgtcaaggcaaagatccaagataaggaaggcatccctcctgaccagcagaggctgatctttgctggaaaacagctggaagatgggcgcaccctgtctgactacaacatccagaaagagtccaccctgcacctggtgctccgtctcagaggtgggatgcaaatcttcgtgaagacactcactggcaagaccatcacccttgaggtcgagcccagtgacaccatcgagaacgtcaaagcaaagatccaggacaaggaaggcattcctcctgaccagcagaggttgatctttgccggaaagcagctggaagatgggcgcaccctgtctgactacaacatccagaaagagtctaccctgcacctggtgctccgtctcagaggtgggatgcagatcttcgtgaagaccctgactggtaagaccatcaccctcgaggtggagcccagtgacaccatcgagaatgtcaaggcaaagatccaagataaggaaggcattccttctgatcagcagaggttgatctttgccggaaaacagctggaagatggtcgtaccctgtctgactacaacatccagaaagagtccaccttgcacctggtactccgtctcagaggtgggatgcaaatcttcgtgaagacactcactggcaagaccatcacccttgaggtcgagcccagtgacactatcgagaacgtcaaagcaaagatccaagacaaggaaggcattcctcctgaccagcagaggttgatctttgccggaaagcagctggaagatgggcgcaccctgtctgactacaacatccagaaagagtctaccctgcacctggtgctccgtctcagaggtgggatgcagatcttcgtgaagaccctgactggtaagaccatcactctcgaagtggagccgagtgacaccattgagaatgtcaaggcaaagatccaagacaaggaaggcatccctcctgaccagcagaggttgatctttgccggaaaacagctggaagatggtcgtaccctgtctgactacaacatccagaaagagtccaccttgcacctggtgctccgtctcagaggtgggatgcagatcttcgtgaagaccctgactggtaagaccatcactctcgaggtggagccgagtgacaccattgagaatgtcaaggcaaagatccaagacaaggaaggcatccctcctgaccagcagaggttgatctttgctgggaaacagctggaagatggacgcaccctgtctgactacaacatccagaaagagtccaccctgcacctggtgctccgtcttagaggtgggatgcagatcttcgtgaagaccctgactggtaagaccatcactctcgaagtggagccgagtgacaccattgagaatgtcaaggcaaagatccaagacaaggaaggcatccctcctgaccagcagaggttgatctttgctgggaaacagctggaagatggacgcaccctgtctgactacaacatccagaaagagtccaccctgcacctggtgctccgtcttagaggtgggatgcagatcttcgtgaagaccctgactggtaagaccatcactctcgaagtggagccgagtgacaccattgagaatgtcaaggcaaagatccaagacaaggaaggcatccctcctgaccagcagaggttgatctttgctgggaaacagctggaagatggacgcaccctgtctgactacaacatccagaaagagtccaccctgcacctggtgctccgtctcagaggtgggatgcaaatcttcgtgaagaccctgactggtaagaccatcaccctcgaggtggagcccagtgacaccatcgagaatgtcaaggcaaagatccaagataaggaaggcatccctcctgatcagcagaggttgatctttgctgggaaacagctggaagatggacgcaccctgtctgactacaacatccagaaagagtccactctgcacttggtcctgcgcttgagggggggtgtctaa

SEQ ID NO: 511 - DNA, 1230 bp, human
atggattctgtcatgccttcccaagagcctccagtagacgacaagaacgaggacgccgaccttccttccgaggagacagatggaattgcttacatttcctcatcccggaagcatgacagcattaaagacgactcggaggaccttaagccagttatcgatgggatggatggaatcaaaatctctcaggggcttgggctgcaggactttgacctaatcagagtcatcgggcgcgggagctacgccaaggttctcctggtgcggttgaagaagaatgaccaaatttacgccatgaaagtggtgaagaaagagctggtgcatgatgacgaggatattgactgggtacagacagagaagcacgtgtttgagcaggcatccagcaaccccttcctggtcggattacactcctgcttccagacgacaagtcggttgttcctggtcattgagtacgtcaacggcggggacctgatgttccacatgcagaggcagaggaagctccctgaggagcacgccaggttctacgcggccgagatctgcatcgccctcaacttcctgcacgagagggggatcatctacagggacctgaagctggacaacgtcctcctggatgcggacgggcacatcaagctcacagactacggcatgtgcaaggaaggcctgggccctggtgacacaacgagcactttctgcggaaccccgaattacatcgcccccgaaatcctgcggggagaggagtacgggttcagcgtggactggtgggcgctgggagtcctcatgtttgagatgatggccgggcgctccccgttcgacatcatcaccgacaacccggacatgaacacagaggactaccttttccaagtgatcctggagaagcccatccggatcccccggttcctgtccgtcaaagcctcccatgttttaaaaggatttttaaataaggaccccaaagagaggctcggctgccggccacagactggattttctgacatcaagtcccacgcgttcttccgcagcatagactgggacttgctggagaagaagcaggcgctccctccattccagccacagatcacagacgactacggtctggacaactttgacacacagttcaccagcgagcccgtgcagctgaccccagacgatgaggatgccataaagaggatcgaccagtcagagttcgaaggctttgagtatatcaacccattattgctgtccaccgaggagtcggtgtga

SEQ ID NO: 512 - DNA, 735 bp, human
atggaggtgacgggggtgtcggcacccacggtgaccgttttcatcagcagctccctcaacaccttccgctccgagaagcgatacagccgcagcctcaccatcgctgagttcaagtgtaaactggagttgctggtgggcagccctgcttcctgcatggaactggagctgtatggagttgacgacaagttctacagcaagctggatcaagaggatgcgctcctgggctcctaccctgtagatgacggctgccgcatccacgtcattgaccacagtggcgcccgccttggtgagtatgaggacgtgtcccgggtggagaagtacacgatctcacaagaagcctacgaccagaggcaagacacggtccgctctttcctgaagcgcagcaagctcggccggtacaacgaggaggagcgggctcagcaggaggccgaggccgcccagcgcctggccgaggagaaggcccaggccagctccatccccgtgggcagccgctgtgaggtgcgggcggcgggacaatcccctcgccggggcaccgtcatgtatgtaggtctcacagatttcaagcctggctactggattggtgtccgctatgatgagccactggggaaaaatgatggcagtgtgaatgggaaacgctacttcgaatgccaggccaagtatggcgcctttgtcaagccagcagtcgtgacggtgggggacttcccggaggaggactacgggttggacgagatatga

SEQ ID NO: 513 - DNA, 14808 bp, human
atgggcaacgaggcgagcttggaaggggaagggctccccgaagggctggcggcggccgcagcggctggaggaggagctagcggggcggggagcccctctcacaccgcgatcccggccggcatggaggcggatttgagccagctgagcgaagaggagaggagacagatcgccgctgtcatgtcaagggcgcaggggctgcccaagggaagcgtccccccggccgctgcggagtcgccttccatgcacaggaaacaagagttggatagtagtcatcctccaaagcaatcaggaagacccccggaccctgggcgtccagctcaacctggtctcagtaaaagtagaactacagacactttcaggtcagagcagaaattgcctgggaggagtccttccactattagcttgaaagaatcaaagtccagaactgatttaaaggaagagcacaagtctagtatgatgcctggcttcctctcagaggttaacgctttaagtgctgtttcctctgttgtaaataaattcaacccttttgatttgatatcagactctgaggcatcccaggaagaaaccaccaagaaacaaaaagtggttcagaaggagcaaggaaaacctgaaggaatcataaaacctcctttacaacaacagccacccaagccgattcctaagcagcaaggacctggtagggatccgcttcagcaggatggcactcccaaatcaatatcttctcaacaaccagaaaaaattaaatcacaacctccaggtacaggaaagccaattcagggtcctacccagactcctcagacagaccatgcaaaattgccacttcaacgagatgcatccaggcctcagactaaacaggcagacatagtaaggggagaatcagttaaaccctcactgccaagcccatccaaaccacctattcagcaaccaactcctggaaaacctccagcacagcagcctggacatgaaaaatcacagcctgggcctgcaaagcccccagctcagccctcagggctaacaaagccattggctcaacaaccagggacagtgaaacccccagtccagccaccagggacaacaaagcctccagctcagcctcttggtcctgctaagcctccagctcagcagactgggtcagagaagccttcatcggagcagcctgggccaaaggctttagctcagcctcctggagttggaaagactccagctcaacagccagggccagcaaagcctccaacccagcaggtggggacaccaaaacccctagctcaacaacctgggctacagtctccagctaaggcacctgggcctacaaagactccagttcagcagcctgggccaggaaagattccagctcaacaggcaggacccggaaagacttctgcccagcagactggcccaacaaagcctccttcacaactgcctggcccagcaaagcccccacctcaacagcctggcccagcaaagcccccacctcaacagcctggctcagcaaagcccccatctcaacagcctggctcaacaaaacccccacctcaacagcctggcccagcaaagccctcacctcaacagcctggctcaacaaaacccccatctcaacagcctggctcagcaaaaccctcagctcaacagcctagcccagcaaagccctcggctcagcaatctacaaaaccagtaagccaaacaggatctggaaaacctctgcagccaccaacagtgtctccatctgcaaaacagcctccttcacaaggcctccctaaaaccatctgtcctctttgcaataccactgaacttctgttgcatgttccagaaaaggccaattttaacacatgcactgagtgtcaaaccactgtctgtagtctctgtggttttaatcccaatcctcatttaacggaggtaaaagagtggctctgtttgaactgtcaaatgaaaagagctctaggcggggatctggctccagttccgtcatcaccccagcccaaactgaagactgcacctgttaccactacatcagcagtgagcaaatcatccccacagccacagcagacttccccaaagaaggatgctgcaccaaaacaggatctctccaaggcacctgagcctaaaaagccaccaccactagtgaaacaaccaacccttcatggctctccttcagccaaggccaagcagccccctgaggcagattctttgtccaagccagcccctcccaaagaaccttctgtcccatctgagcaggacaaggcccctgttgctgatgataaaccaaagcagcccaagatggtaaagccaaccactgaccttgtatcttcatcatcagcaacaacaaaacctgatattccaagctccaaagtacagtcacaagctgaagagaaaacaacccctcctctaaaaacagactctgccaaaccctcacagagttttccaccaacaggggaaaaagtcagcccatttgattctaaagccatacctcgacctgcatcagattcaaaaattatttcacatcctggtcccagttcagagagcaaaggtcaaaaacaagttgaccccgtacaaaagaaggaagaacccaagaaagcacaaaccaaaatgagtcctaaaccagatgccaagccaatgccaaaagggtcaccaacaccccctggcccacgacctaccgctggccaaactgtccccacacctcaacagtccccaaagcctcaggagcagtcaaggcgtttcagtctgaatctgggaagtattactgatgcccccaaatcacagcctacaactcctcaagagaccgtgactgggaaactctttgggtttggagcatcaatcttcagccaggcatcaaatttaatttccactgcaggccaacctggacctcattcacaaagtggaccaggggccccaatgaaacaagcccctgccccttcacagccacctacttcacaagggccacccaaatccacaggtcaagcaccaccagcacctgcaaaaagtatacctgtgaaaaaggaaacaaaagccccagcagctgaaaaattagagcccaaagctgaacaagctccaacagtaaaaagaacagaaacagaaaaaaagccaccacctattaaggatagcaaatctttaacagctgagcctcaaaaggctgtccttcccacaaaactggagaaatcgcccaaaccagaatcaacctgtcctctctgcaaaactgaactcaacataggttctaaggatcctcctaacttcaatacttgcactgaatgcaagaatcaagtgtgtaatctctgtggatttaaccctacaccacatttgactgagattcaagaatggctttgtttaaattgccaaacccagagagcaatatcaggacagcttggagacatacgcaaaatgccacctgcaccatcaggacccaaagcatctcctatgcctgttcctacagaatcatcatctcagaaaacagcagtgcctccccaagtaaaattagtgaaaaagcaagaacaagaagtaaaaacggaagctgaaaaagtcattctggaaaaagtaaaggaaacactatcaatggaaaaaattcctcctatggtaaccacagatcaaaaacaagaagagagtaaactagagaaagacaaagcttcagctcttcaagaaaaaaagccactccctgaagaaaaaaaactaatccctgaagaagaaaagatacgttctgaagaaaaaaagccactcctagaagaaaaaaagccaacccctgaagacaaaaagctactcccagaggcaaaaacatcagccccagaagaacagaaacatgacttacttaaatctcaagtacaaattgctgaagaaaagcttgaaggcagagtggctccaaagacagtgcaagaagggaaacaaccacagaccaagatggaaggtttaccatctggcacacctcagagtttacctaaagaagatgataagacaaccaaaacaataaaagaacagccacagccaccatgcacagcaaaacctgatcaggtggaacctgggaaagaaaaaacagaaaaggaagatgacaaatcagacacctcaagttctcagcagcctaaaagcccccaaggtctgagcgacacgggatattcttccgatggaatatcaagctcacttggtgaaattccaagtcttattccaactgatgaaaaggatattctcaagggactcaaaaaggactctttttcacaagaaagcagcccttccagcccctcagatttggctaagttagaaagtacagtcctatctattttggaagctcaagcaagtacacttgctgatgaaaagtcagaaaagaaaacacaaccccatgaagtttctcctgaacagcctaaagaccaagagaaaactcagagtttatctgaaaccttggaaattactatttcagaagaggagatcaaagagagtcaagaagaaaggaaagacacttttaaaaaagatagccaacaagatattccttccagcaaggaccataaagagaagtctgagtttgttgatgacataactactagaagagagccttatgattcagttgaagagagtagtgaaagtgaaaactcacctgttccacaaagaaaacgaagaactagtgttggctcatcaagcagtgatgagtataaacaggaagacagccaaggatcaggggaagaggaggacttcattcgaaaacaaatcatagaaatgagtgctgatgaagatgcttcaggttctgaagatgatgagttcatcagaaaccagctcaaagagattagtagcagtactgagagccagaagaaggaagaaacaaagggaaaaggcaaaataacagcagggaaacacagacgactgactcgaaaaagtagcacaagcattgatgaagatgcaggaagacgtcactcatggcatgatgaagacgatgaagcatttgatgaaagtcctgaacttaaatacagagaaactaaaagtcaggaaagtgaagaacttgtagttactggaggaggagggctacgccgatttaaaacaattgagctcaacagtacaatagcagataaatattctgcagagtcatcacagaaaaaaacaagtttgtattttgacgaagagccagaattggaaatggaaagcctgacagactcacctgaagataggtcaaggggagagggatcttcgagtctgcatgcttccagcttcactcctggtacatcccctacatcagtatcatcacttgatgaggacagtgacagtagcccgagtcacaaaaaaggagagagcaaacagcaacgcaaagctcggcacagaccacatggccctcttttgcctactattgaagattcttcagaggaagaagaattgagagaggaagaagaattattaaaggagcaagaaaagcagagggaaatagaacagcaacaaagaaagagttctagtaaaaaatcaaagaaagacaaagatgaacttcgagctcagagaagaagggaaaggccaaagacaccacctagtaatctctctcccattgaagatgcatctccgacagaagagttacgtcaggctgcagaaatggaggagctccatagatcttcttgttctgaatattcacctagcatagagtcagacccagaaggttttgaaataagcccggaaaaaataatagaagtacaaaaagtttataaattgcccacagctgtttcattatactcaccaacagatgagcaatctattatgcagaaagaaggtagccaaaaggcgttaaaaagtgctgaggagatgtatgaagaaatgatgcataaaacacacaaatacaaagcttttccagctgcaaatgaacgagatgaagtgtttgaaaaagagcctttgtatggtgggatgctaatagaggattatatttatgaatctttagtagaagacacgtacaatggatcggtagatggcagtctgctaacaaggcaagaagaagaaaatggatttatgcagcagaaaggaagagagcaaaagataagactttcagaacagatttatgaagatcctatgcagaaaattacagacctccagaaagagttttatgagttagaaagcttacattctgttgtgcctcaggaagatattgtttcaagctcttttatcatcccagaaagccatgagatagtggacctgggtactatggtaacttctacagaagaagaaaggaaactactagatgctgatgctgcctatgaagaacttatgaagaggcaacagatgcaattaacacctggatctagcccaacccaggcccccattggtgaggatatgacagagtccaccatggactttgacagaatgccagatgcctctttgacatcaagtgttctctcaggagcgtctcttacagattcgaccagcagtgcaacactctctatcccagatgttaaaataacccaacatttttcaacagaagaaattgaggatgaatatgtaaccgattatacaagagaaattcaagagataattgcccatgaatcgctgattttgacctactcggagccttcagaaagtgctacatctgtcccaccctctgacacaccttctctcacatcatctgtttcttcggtctgtaccacagatagctcttcacccattactaccctggatagcataaccacagtttatacagagccagtggacatgataactaaatttgaagattctgaggaaatttcttcatcaacttattttccaggcagcattatagactatccagaagaaataagtgtatctttagatcggactgccccaccagatggtagagctagtgctgatcatattgttatttccttatctgatatggcatcttctatcatagaatctgtagtacctaaacctgaagggccagttgctgacactgtttctactgacttacttatatctgaaaaggacccagtgaagaaagccaagaaggaaactgggaatggaatcattctggaagttttggaagcttacagagataaaaaggagttggaggccgaacgaacaaaaagtagcttatccgaaaccgtgtttgatcacccaccttcttctgtaatagcccttccaatgaaagagcagctttcaactacatactttacatctggagagacctttggtcaggaaaaacctgcatctcagttaccatctggcagtccttctgtttcctctcttccagctaaacctcgcccattctttagaagttcttctttggatatatcagctcaacctcctccccctcctccccctccccctcctcctcctcctccaccaccaccccctcctcccccaccacttcctccaccaacttcacctaaaccaactattcttcctaaaaaaaagttaacagttgcatctccagtgactacagctacacctctgtttgatgctgttactactctagagaccacagctgttctgagaagtaatggattacctgttacaagaatatgtactactgcacctcctcctgttcctcctaagccatcttcaattccatctggacttgtatttacccacaggcctgagccaagcaaacctccaatcgcccccaaaccagtgattcctcagcttccaacaactacacaaaaaccaacagatatacaccccaaaccaacaggcctatctttaacttcaagtatgaccttaaatttagtgacttcagcagattataaattgccttcccctacctccccactttccccacactccaacaagtcttcaccaagattttccaaatccctcacagaaacttatgtagttattacattgccatctgaaccagggactccaacagattcttctgctagtcaagcaattaccagttggcccttgggatcaccctccaaagatctggtttctgttgaacctgtgttttctgtagttcctcctgtgacagctgtagaaattccaatttcttcagaacagaccttctacatctctggagctttacagacattttctgctacccctgtcacagcaccctcttcatttcaagcagctcccacatcagttacacagtttctcactactgaagtttccaagactgaggtttcagcaaccagaagtacagctcctagtgttggtctcagcagcatttccataacaattcctccagagcctcttgctctagataacatacatttagagaagcctcagtataaagaagatggaaaattgcaacttgttggtgatgtaattgatttgcgtacagtaccaaaggtagaagttaaaacaactgataaatgtattgatctttctgcttctacaatggatgtgaaaaggcagatcacagcaaatgaagtttatgggaaacaaattagtgctgtccaaccctctattataaatcttagtgtgacatcatcaatagtgactcctgtatctctggccactgagacagtgacctttgtcacatgcacagctagtgcaagttacactacaggcacagaaagcctagtgggtgcagaacatgcaatgacaacaccactccaacttacaacatcaaagcatgctgagcccccatacaggataccaagtgaccaggtctttcctatagctagggaagaagcaccaataaacttatctctaggtactccagcacatgcagtgacattggctattacaaaacctgtcactgtgcctcctgttggtgtcacaaatggatggactgatagcaccgtatcccagggaatcactgatggggaagtagtggatctcagtacaaccaagtctcacagaacagtcgtaacaatggatgagtctacttcaagtgtgatgaccaaaataatagaagatgaaaaacccgttgatttaaccgcagggagaagagctgtgtgctgtgatgtggtttataaattaccatttggaaggagctgcacagcacagcagcctgcaactactcttcctgaggatcgttttggttatagggatgaccactatcagtatgatcgatcagggccatatggttatagagggattgggggaatgaagccttccatgtctgacacaaatttagcagaagctggacattttttctataaaagtaagaatgcttttgattattctgaaggaactgacacagcagtagatctgacttcagggagagttactacaggtgaggtaatggattattcaagcaagactacaggtccatatccagaaacacgacaagtcatttcaggagctgggattagtaccccacagtattccacagcaagaatgacaccaccaccaggaccccagtattgtgtggggagtgttttgaggtcatctaatggtgttgtctattcttcagtagcaactccaacaccctctacatttgctatcaccacacaacctggctccattttcagcaccacagtgagggatttgtctggtattcatacggctgatgcagtgacttcattacctgccatgcaccatagccagccaatgcctagatcatattttataacaacaggtgcatctgaaacggacattgcagtaactggtattgatatcagtgccagtttgcaaactattactatggagtctcttactgctgagacgatagactctgttcccactttaaccacagcatccgaagtgtttcctgaagtggtgggagatgaaagtgctcttttaattgtccctgaagaagataaacaacagcagcagctagacttggagcgtgagctcctggaactggagaaaattaagcaacagcgctttgctgaggaattggagtgggaacgtcaggaaattcaaaggttccgagaacaagaaaagatcatggttcagaaaaagttggaggagctgcagtctatgaagcaacaccttctctttcagcaagaagaagagcggcaagcccagttcatgatgaggcaggagacgttagctcagcaacagttacagcttgagcagatccaacagctgcaacaacagcttcaccagcagctggaggagcaaaagattcggcagatctaccagtataactatgacccttctggaactgcttctccacaaaccactacagagcaggcaattttggaaggtcagtatgctgctctggaaggcagtcaattttgggcaactgaagatgcaaccaccacagcttcagctgttgtggcaattgaaataccacaaagccaaggatggtacaccgttcagtctgatggtgttactcagtacattgccccacctggtatcctgagcactgtttcagaaatacctctaacagatgttgttgtgaaagaggaaaaacaacccaaaaagagaagttctggagctaaagtccgaggacagtatgatgacatgggagaaaatatgacagatgatccccgaagttttaaaaagatagtggacagtggtgtacaaacggatgacgaagatgccacagatcggagctatgtgagtaggagaaggagaactaaaaagagtgtggatacaagcgtccaaactgatgatgaagatcaggatgagtgggatatgcctactagatcaaggaggaaagctcgtgtagggaaatatggtgacagcatgacagaggctgacaagaccaaacccctttccaaagtctccagcatagcagttcaaacggtagcagagatatctgtgcaaactgaaccagttggaaccataagaacaccctccatacgggcacgagtggatgccaaggtagaaataattaaacacatttcagcacctgaaaagacttacaaagggggcagtttaggatgtcaaacagaagcagattcagacacacaaagtcctcaatatctgagtgccacatctccacccaaagacaagaaacgcccaacacctttagagattggttattcatctcacctccgggcagattccacagtacagctggctccttccccacccaaatcccccaaagtcctttactcacccatctcaccactttcaccaggcaaagccttagaatcagcctttgtaccttatgaaaaacccctccctgatgatataagtccacagaaagtactgcatccagatatggctaaagttcccccagcaagtcctaagacagccaagatgatgcagcgttctatgtctgaccccaagcctctgagtccaacagcagacgaaagttccagggctccttttcagtataccgagggctatacgactaaaggttctcaaaccatgacatcctctggagcccagaaaaaagttaaaagaactctgccaaatccacctcctgaggagatttccacaggaactcaatccacattcagcacaatgggcacagtttccaggagaaggatctgcagaaccaacacaatggcacgagccaagattctccaggacatagacagagagcttgatcttgtggaaagggagtctgcaaaacttcgaaagaaacaagcagagcttgatgaagaagaaaaggagattgatgctaagctacgatacctggaaatgggaattaacaggaggaaagaggccctattaaaggagagagaaaagagagaacgagcctacctccagggagtagctgaggatcgtgattacatgtctgacagtgaagtgagtagcacaagaccaacccgaatagaaagtcagcatggcattgagcgaccaagaactgctccccaaactgaattcagccagtttataccaccacaaacccaaacagaatctcaactagttcctccgacaagtccttacacacaataccagtactcttcccctgctcttcctacccaagcacccacctcatacactcaacagtctcattttgagcaacaaactttgtaccatcagcaagtttcaccttatcagactcagccaacattccaagctgtggcaacaatgtccttcacacctcaagttcaacctacaccaaccccacagccttcttatcagttaccttcacagatgatggtgatacaacagaagccacggcaaactacattatatttggagcccaagataacctcaaactatgaagtgattcgcaaccaaccccttatgatagcacctgtttctacggataacacatttgctgtttcccatcttggtagtaagtacaatagtttagacttgagaataggtttggaggaaagaagtagcatggcaagcagtccaatatcaagcatatctgcagattctttctatgcagatattgatcaccatactccacgaaattatgtcctaattgacgacattggagagatcaccaaaggaacagcggcattaagcaccgcatttagccttcatgaaaaggatctgtcaaaaacagaccgtctccttcgaaccactgagacacgccggtctcaagaagtgacagatttcctagcacctttacagtcttcctctagattgcatagttatgtgaaggcggaggaagacccaatggaggatccttacgagttaaagcttctgaaacatcagattaaacaggaatttcgtagagggacagagagcttagatcaccttgctggtctttctcattattaccatgctgatactagctacagacattttccaaaatctgagaagtatagcatcagtagactcacacttgaaaaacaagcagcaaaacaactgccagcagccatactttatcaaaagcagtcaaagcataagaaatcactaattgaccctaaaatgtcaaaattttcacctattcaagaaagtagagaccttgaacctgattattcaagctatatgacttctagcacttcatctattggtggcatttcctccagggcaaggctccttcaagatgacatcacttttggcctcagaaaaaatattacagaccaacaaaaatttatgggatcttctcttggcacaggactgggcacattaggaaataccatacgctcagctctgcaggatgaagcggataagccatacagtagtggcagcaggtccagaccttcctccagaccttcctctgtctatgggcttgatttatcaattaaaagggattcttctagctcttccctaagactgaaagctcaagaggctgaagctctagatgtttcctttagtcatgcatcatcctctgccagaactaagccgaccagtttgccaattagtcaaagtagaggaagaataccaattgtggcccagaattctgaagaagaaagcccactcagtcctgttggccagccaatgggaatggccagggctgcagctggacccctgccaccaatatctgcagacaccagggatcagtttggatcaagccactcattgcctgaagttcagcaacacatgagggaagaatcacggactcgaggctatgaccgtgacatagcattcatcatggatgacttccaacatgccatgtcagacagtgaagcctatcatctgcgtcgtgaggaaacagattggtttgataaacccagggagtctcgtttggaaaatggacatggtctggaccgaaaactgccggaaagattggtccactctagaccactcagtcaacatcaagagcaaattatacagatgaacgggaaaactatgcactacatctttcctcacgcaaggataaaaataacaagagactcaaaggatcacacagtttcaggtaatggattaggaattagaattgtgggtggtaaagaaatcccgggacatagtggagaaattggagcctatattgccaagattcttcctgggggaagtgcggaacagacggggaagcttatggaagggatgcaagtattggaatggaatggaattcccttgacttctaaaacatatgaagaagttcagagtatcattagtcagcaaagtggggaagcagaaatatgtgtaagactggacctcaatatgctatcagattctgaaaattcccagcatctggaacttcatgagccaccaaaagctgtggataaggcgaaatccccaggggttgatcctaagcagttggcagcagaactccagaaggtttcactacagcagtcaccgctggttctgtcatcagttgttgaaaaaggatctcatgttcattcaggtcctacatcagcaggatccagttccgttcccagccctgggcaaccagggtccccctcagtgagcaaaaagaagcacggcagcagcaagcctaccgatggaacaaaggttgtctctcatccaattacaggagaaattcagcttcaaattaactatgatcttggaaatctcataatacatattctccaagcaagaaatcttgttcctcgagacaacaatggttattctgacccttttgtgaaagtgtaccttcttccagggagaggtcaagtcatggttgtccagaatgcaagtgctgagtacaagagaaggactaaacatgtccagaaaagtcttaatcctgagtggaatcaaacagtaatttataaaagtatttccatggaacagctcaagaagaaaacactggaggtgacagtttgggattatgatagattttcatccaacgacttccttggggaggtattgattgatttatctagcacatctcacctcgataacactccaaggtggtatcctctcaaagaacagactgaaagcattgatcatggcaagtctcattccagtcagagcagccagcagtccccaaagccatctgttatcaaaagcagaagccatggtatcttccctgacccatcaaaggacatgcaggttcccaccattgagaaatcccatagtagtcctggtagctcaaaatcatcatcagaaggccatctccgttctcatggaccatctcgcagtcaaagcaaaaccagcgtcactcagacccacctggaagatgcaggggctgccatagctgctgccgaagctgccgtgcaacaactccgcattcaaccaagtaaaagacgcaaataa

SEQ ID NO: 514 - DNA, 657 bp, human
atgaactgtcgctcggaggtgctggaggtgtcggtggaggggcggcaggtggaggaggccatgctggctgtgctgcacacggtgcttctgcaccgcagcacaggcaagttccactacaagaaggagggcacctactccattggcaccgtgggcacccaggatgttgactgtgacttcatcgacttcacttatgtgcgtgtctcttctgaggaactggatcgtgccctgcgcaaggttgttggggagttcaaggatgcactgcgcaactctggtggcgatgggctggggcagatgtccttggagttctaccagaagaagaagtctcgctggccattctcagacgagtgcatcccatgggaagtgtggacggtcaaggtgcatgtggtagccctggccacggagcaggagcggcagatctgccgggagaaggtgggtgagaaactctgcgagaagatcatcaacatcgtggaggtgatgaatcggcatgagtacttgcccaagatgcccacacagtcggaggtggataacgtgtttgacacaggcttgcgggacgtgcagccctacctgtacaagatctccttccagatcactgatgccctgggcacctcagtcaccaccaccatgcgcaggctcatcaaagacacccttgccctctga

SEQ ID NO: 515 - DNA, 312 bp, human
atgtccgaggagaagcccaaggagggtgtgaagacagagaatgaccacatcaacctgaaggtggccgggcaggacggctccgtggtgcagttcaagatcaagaggcacacgccgctgagcaagctgatgaaggcctactgcgagaggcagggcttgtcaatgaggcagatcagattcaggttcgacgggcagccaatcaatgaaactgacactccagcacagctggagatggaggacgaggacaccatcgacgtgttccagcagcagacgggaggtgtgccggagagcagcctggcagggcacagtttctag

SEQ ID NO: 516 - DNA, 921 bp, human
atggacactcccccgctctcggattcggagtcggaatccgatgaatcccttgtcacagacagagagttgcaggatgcgttttcccgagggcttctgaagccaggcctcaatgtcgtgctagaggggccgaagaaggccgtgaacgacgtgaatggcctgaagcaatgtttggcagaattcaagcgggatctggaatgggttgaaaggctcgatgtgacactgggtccggtaccggagatcggtggatctgaggcgccagcacctcagaacaaggaccagaaagctgttgatccagaagacgacttccagcgagagatgagtttctatcgccaagcccaggccgcagtgcttgcagtcttaccccgcctccatcagctcaaagtccctacgaagcgacccactgattattttgcggaaatggccaaatctgatctgcagatgcagaagattcgacagaagctgcagactaaacaggctgccatggagaggtctgaaaaagctaagcaactgcgagcacttaggaaatacgggaagaaggtgcaaacggaggttcttcagaagaggcagcaggagaaagcccatatgatgaatgctattaagaaatatcagaaaggcttctctgataaactggatttccttgagggagatcagaaacctctggcacagcgcaagaaggcaggagccaaaggccagcagatgaggaaggggcccagtgctaaacgacggtataaaaaccagaagtttggttttggtggaaagaagaaaggctcaaagtggaacactcgggagagctatgatgatgtatctagcttccgggccaagacagctcatggcagaggcctcaagaggcctggcaagaaagggtcaaataagagacctggaaaacgaacaagagagaagatgaagaacagaacacactaa

SEQ ID NO: 517 - DNA, 1428 bp, human
atgccgggcatctccgcccgaggcctctctcatgaggggaggaagcagctagctgttaacctcacccgtgtcctggcactctaccgttccatcttggatgcctacatcatcgaatttttcacagacaacctatgggacacactcccttgctcatggcaggaagcattggatggactgaaaccaccacagctggccacaatgctgctggggatgcctggggaaggggaggtcgtcaggtacaggtcagtgtggccactcaccctgctggccctgaagtccacggcgtgtgccctggcctttacccggatgcctggctttcagaccccctcagaattcctggagaaccccagccagagctcccgactaacagctccattccggaaacatgtcaggcccaagaagcagcatgagatccggaggctgggagagttggtgaagaagctgagtgatttcacaggctgcacccaggttgtagacgtgggctcaggccagggccatctctcccgcttcatggctcttggcctggggttgatggtgaagagcatcgaaggggatcagagactggtggagagagcccagcgcctggaccaggagcttctgcaggctctggagaaagaggagaagaggaacccgcaggtggtccaaaccagccctcgtcactccccacaccacgtggttaggtgggtagaccccacagccctgtgtgaggagcttctgcttccactggagaacccgtgtcagggcagggcccgcttgctgctcacaggcctccacgcctgtggggatctgagtgttgccttgctgagacacttctcctgctgtcctgaggtggtggccctggcctcagtgggctgctgctacatgaagctgagtgaccctggcggctacccactgagtcagtgggtggctgggctgcctggctatgaactgccctaccggcttcgggagggggcctgccatgccctggaggaatatgctgagcggctacagaaagctggccctggccttcgaactcactgctaccgtgcagcactggagacagtcatccgacgggcccggcccgagctccgtcggccaggcgtgcagggtatccccagggtccacgagctcaagattgaagaatatgtgcagcgggggctacagcgagtggggctagatccccagctgccactgaatctggctgcccttcaggcccacgtggcccaggagaaccgtgtggtggccttcttcagcctggctctactgcttgccccactggtggagacgcttattctactggaccggctgctgtaccttcaggaacagggtttccatgctgagctcctgcccatcttcagtcctgaactctctcccagaaacctggttctggtggccaccaagatgcccctgggtcaggctctttctgttctggagactgaagacagctga

SEQ ID NO: 518 - DNA, 1437 bp, human
atggcacccctgagaccccttctcatactggccctgctggcatgggttgctctggctgaccaagagtcatgcaagggccgctgcactgagggcttcaacgtggacaagaagtgccagtgtgacgagctctgctcttactaccagagctgctgcacagactatacggctgagtgcaagccccaagtgactcgcggggatgtgttcactatgccggaggatgagtacacggtctatgacgatggcgaggagaaaaacaatgccactgtccatgaacaggtggggggcccctccctgacctctgacctccaggcccagtccaaagggaatcctgagcagacacctgttctgaaacctgaggaagaggcccctgcgcctgaggtgggcgcctctaagcctgaggggatagactcaaggcctgagacccttcatccagggagacctcagcccccagcagaggaggagctgtgcagtgggaagcccttcgacgccttcaccgacctcaagaacggttccctctttgccttccgagggcagtactgctatgaactggacgaaaaggcagtgaggcctgggtaccccaagctcatccgagatgtctggggcatcgagggccccatcgatgccgccttcacccgcatcaactgtcaggggaagacctacctcttcaagggtagtcagtactggcgctttgaggatggtgtcctggaccctgattacccccgaaatatctctgacggcttcgatggcatcccggacaacgtggatgcagccttggccctccctgcccatagctacagtggccgggagcgggtctacttcttcaaggggaaacagtactgggagtaccagttccagcaccagcccagtcaggaggagtgtgaaggcagctccctgtcggctgtgtttgaacactttgccatgatgcagcgggacagctgggaggacatcttcgagcttctcttctggggcagaacctctgctggtaccagacagccccagttcattagccgggactggcacggtgtgccagggcaagtggacgcagccatggctggccgcatctacatctcaggcatggcaccccgcccctccttggccaagaaacaaaggtttaggcatcgcaaccgcaaaggctaccgttcacaacgaggccacagccgtggccgcaaccagaactcccgccggccatcccgcgccacgtggctgtccttgttctccagtgaggagagcaacttgggagccaacaactatgatgactacaggatggactggcttgtgcctgccacctgtgaacccatccagagtgtcttcttcttctctggagacaagtactaccgagtcaatcttcgcacacggcgagtggacactgtggaccctccctacccacgctccatcgctcagtactggctgggctgcccagctcctggccatctgtag

SEQ ID NO: 519 - DNA, 5181 bp, human
atgtctgattttgtggaaagcgaggctgaggagtcagaggaagaatacaatgatgaaggcgaggtggtaccccgagtcaccaagaaatttgtggaagaggaggatgatgatgaggaggaggaggaggagaacctagatgatcaggatgagcaaggcaacttgaaaggctttatcaatgacgatgatgatgaagatgaaggggaggaggatgagggcagtgactctggtgattcagaagatgatgttggccacaagaagagaaaacgcacctcttttgatgaccgcctggaggatgatgattttgacctcattgaggagaatttgggtgtcaaagtcaaaagaggacaaaagtaccggcgtgtcaaaaaaatgtcagatgacgaggacgatgacgaggaggaatatggcaaggaggaacatgaaaaagaagctattgcggaagaaatcttccaggatggggaaggggaagaagggcaggaggccatggaggcccccatggctcctccagaggaggaggaagaagatgatgaggagtcagatattgacgacttcattgtggatgatgatggacagcctctgaaaaaacctaagtggcggaaaaagcttcctggatacacagacgcggccctgcaagaagcccaggaaatcttcggtgtggactttgactatgatgaatttgagaaatacaatgagtatgatgaagaactggaggaagagtatgagtatgaggatgatgaggctgagggtgaaatccgagtgcgccccaagaagaccaccaagaagcgtgtgagccgtaggagcatctttgaaatgtatgagcccagtgagctagaaagcagccacctcacagatcaggacaatgaaatccgagccactgacctgcctgagaggttccagctccgctccatcccagtcaagggggctgaagatgatgaactagaagaagaagctgactggatctacaggaatgcttttgccacaccaaccatttctctccaggaaagctgtgattacctagaccgagggcagccagccagcagcttcagtcggaaagggcccagcacaattcagaagatcaaagaggccctgggcttcatgcgaaatcagcattttgaggtgccttttattgccttctatcgaaaggagtatgtggagcctgagttgcacatcaatgacctatggagagtctggcagtgggatgaaaagtggacccagctgcggatccgtaaagagaacctaacacggctgtttgagaagatgcaggcttatcagtatgaacagatctctgctgaccctgacaaacctcttgctgatggcatccgggctctggacaccactgacatggagaggctcaaggatgtccaatcaatggatgagctgaaagatgtctacaaccattttcttctttattatggccgagacatccctaagatgcagaacgccgccaaagctagccgcaagaagctgaagcgtgtcagggaagagggagatgaagaaggtgaaggtgacgaggcagaagatgaggagcagagggggcctgagctcaagcaagcctctcgccgagacatgtacaccatctgccagagtgctgggctagatggcctggccaaaaagtttgggcttactcccgagcagtttggggagaacctgcgggatagctaccagcggcacgagacagagcagtttcccgcggagcccttggagctggccaaggattacgtttgcagccagttccctactccagaagctgtgctagaaggcgcccgctacatggtagccctgcagattgcccgtgagccccttgtccggcaggtgctgaggcaaaccttccaagagagagccaagttaaatataacccccaccaagaaaggtagaaaggatgtggatgaggcccactatgcctattccttcaagtatttaaagaacaagcctgttaaggaactgagagatgaccagtttctcaagatatgcctggctgaagacgaagggctcctcaccactgacatcagcatagatttgaagggagtggaaggctatggcaacgaccagacatattttgaggagataaaacagttttactaccgagatgagttcagccaccaggtgcaggagtggaaccggcagcgcaccatggccatcgaacgggctttacagcagttcctctatgtgcagatggccaaagaactcaagaacaagctgctggctgaagccaaggaatatgtcataaaggcctgtagtcgaaagctctacaattggttgagagtggcaccctaccgaccagatcagcaggtggaagaagatgacgactttatggacgagaaccaagggaagggcattcgagtcctcggcattgctttctcctctgccagagatcaccctgtgttctgcgccctggtcaatggtgaaggagaagtgacagacttccttcgactgccccattttaccaaacggcgaactgcatggagagaggaagagcgggaaaagaaggctcaagacattgaaacgctaaagaaatttctcctgaataagaagcctcatgtagtgacagttgcaggagagaacagggacgcccagatgttgattgaagatgtgaagcgcattgtacatgagctggaccagggccagcagctgtcatctattggggtagagctggttgacaacgagttggccattctctatatgaacagcaagaagtcagaggcagagttccgggattatcctccagtgctgagacaggccgtctccctggcccggcgcatccaggaccctctgattgaatttgcccaggtgtgcagttccgatgaagacatcctgtgtctcaagtttcaccccttgcaggagcatgtggtgaaagaggagctgctcaacgccttgtactgtgaatttatcaaccgagtcaatgaggtcggggtcgatgtcaaccgtgccattgcccacccttacagccaggccttgatccagtatgtttgtggcctgggacctcggaaagggacccacctcctgaagatcctgaagcagaacaacacccggctcgagagccggacccagctggtcaccatgtgccacatgggtcccaaagtcttcatgaattgtgctggcttcctcaagatcgacacggcctccctgggggacagcactgactcatatattgaagtccttgatggttcccgtgtccaccctgagacttatgagtgggctaggaagatggcagtggatgccctggaatacgatgaatcagccgaggatgccaatcctgcaggagcccttgaagaaatcttggaaaacccagagcgactgaaagacctggaccttgatgcctttgcagaagagctggagaggcagggctatggtgacaaacacatcacactctatgacatccgggcagagctgagctgtcgatataaggacctccggacagcctaccgctctcccaacacagaggagatcttcaatatgttaaccaaagaaacaccagagaccttctacattggaaagctcatcatctgcaatgtcactggcattgcccacaggcgtccccagggtgagagctatgaccaggcgatccgcaatgatgagacagggctgtggcagtgccccttctgtcagcaggacaatttccctgaactaagcgaggtgtggaaccactttgacagcggttcgtgcccaggccaggccatcggtgtcaaaacacggctagacaatggtgtcaccggcttcatccccaccaaattcctcagtgacaaagtggtaaagcggccagaagaacgagtgaaggtgggaatgactgttcactgccgcatcatgaagattgacattgagaagttcagtgcagacctgacctgccgcacctcagacctcatggacaggaacaatgagtggaagctgcccaaagacacctactatgactttgatgctgaagctgcagaccacaagcaggaggaggacatgaagcggaagcagcagcggaccacatacatcaagagagtgatcgcacacccatccttccataatatcaatttcaagcaagcagaaaagatgatggagaccatggaccagggtgatgtgattatccgaccaagcagcaagggcgagaaccacctgacagtgacctggaaagtcagtgatggcatctaccagcatgtggatgtgcgggaggagggcaaggaaaatgccttcagcctgggagccactctgtggatcaacagtgaggaattcgaagatttggatgagattgttgctcgctatgtccagcccatggcatcctttgcccgggaccttctgaatcacaagtattatcaggactgcagcggtggggaccgcaagaaattagaggagctgctcatcaaaactaagaaggagaagcccaccttcatcccttatttcatctgtgcctgcaaggaactgcccggcaagttcctactgggataccagccccggggtaaacccaggatagaatatgtaacggtgactccagagggattccggtaccggggccagatcttcccaaccgtgaatggactgtttagatggtttaaggatcactaccaggatcctgtaccaggcatcacccctagcagcagcagcaggacccggacacctgcctctatcaatgctaccccagccaacatcaaccttgcagatctgacacgggctgtgaatgccctgcctcagaacatgacttcacagatgttcagtgccattgctgcggtgacaggccaaggacagaaccctaatgccaccccagcccagtgggcctccagccagtacggctatggcggcagtggaggcggcagcagtgcttaccacgtattcccaacgccagcccagcagccagtggccacaccactaatgacccctagctactcctacacgaccccaagccagcccatcaccacccctcagtaccaccagctccaggccagcaccaccccacagtcggcccaggcccagccccagccctcttccagctcccggcaacggcagcagcagccaaagtccaacagccatgcagccatcgactggggaaaaatggcggagcagtggctgcaggaaaaggaggcagaacggcggaaacagaagcagcggctgacacctcggccctcccccagccccatgatcgaaagcacccccatgtccattgctggcgatgccaccccactcctggacgagatggatcggtag

SEQ ID NO: 520 - DNA, 342 bp, human
atggtgcggttcaagcacaggtacctgctctgcgaactggtgtctgacgacccccgctgccgcctaagcctcgatgaccgagttctgagcagcctcgtacgggacacgatcgccagggtgcacggaactttcggcgcagccgcctgctccatcggcttcgcgggtacaataagaacatgtcagaagttcctaattcagtacaacaggagacagctgttgatcttgttgcagaactgcactgatgaaggagagcgggaagctatccagaagtctgtgacaagaagctgcttattagaggaggaggaggagtcaggtgaggaggctgcagaagcaatggagtga

SEQ ID NO: 521 - DNA, 2304 bp, human
atggcgacatacctggagttcatccagcagaatgaagaacgggatggtgtgcgttttagttggaacgtgtggccttccagccggctggaggctacaagaatggttgtacccctggcttgtctccttactcctttgaaagaacgtccagacctacctcctgtacaatatgaacctgtgctttgcagcaggccaacttgtaaagctgttctcaacccactttgtcaggttgattatcgagcaaaactttgggcctgtaatttctgttttcaaagaaatcagtttcctccagcttatggaggcatatctgaggtgaatcaacctgccgaattgatgccccagttttctacaattgagtacgtgatacagcgaggtgctcagtcccctctgatctttctctatgtggttgacacatgcctggaggaagatgaccttcaagcactcaaagagtccctgcagatgtccctgagtcttcttcctccagatgctctggtgggtctgatcacatttggaaggatggtgcaggttcatgagctaagctgtgaaggaatctccaaaagttatgtcttccgagggaccaaggatttaactgcaaagcaaatacaggatatgttgggcctgaccaagccagccatgcccatgcagcaagcacgacctgcacaaccacaggagcacccttttgcttcaagcagatttctgcagcctgttcacaagattgatatgaacctcactgatcttcttggggagctacagagggacccatggccagtaactcaggggaagagacctttgcgatccactggtgtggctttgtccattgctgttggcttgctggagggcacttttccaaacacaggagccaggatcatgctgtttactggaggtccccctacccaagggcctggcatggtggttggagatgaattaaagattcctattcgttcttggcatgatattgagaaagataatgcacgattcatgaaaaaggcaaccaagcactatgagatgcttgctaatcgaacagctgcaaatggtcactgcattgatatttatgcttgtgcccttgatcaaactggacttttggagatgaagtgttgtgcaaatcttactggaggctacatggtaatgggagattctttcaacacttctctcttcaagcagacattccaaagaatctttactaaagattttaatggagatttccgaatggcatttggtgctactttggacgtaaagacctctcgggaactgaagattgcaggagccattggtccatgcgtatctctgaatgtgaaaggaccgtgtgtgtcagaaaatgagcttggtgttggtggcacgagtcagtggaaaatctgtggcctagatcctacatctacacttggcatctattttgaagttgtcaatcagcacaacaccccgatcccccaaggaggcagaggagccatccagtttgtcacgcattatcagcactccagcacccagagacgcatccgcgtgaccaccatcgcccgaaattgggcagatgtacagagtcagctcaggcacatagaagcagcatttgaccaggaggctgcggcagtgttgatggcacggcttggggtgttccgagcggagtcagaggaggggcccgatgtgctccggtggctggaccgacaactcatccgactgtgtcaaaagtttggacagtataacaaagaagaccccacttcttttaggttatcagattccttttctctatatcctcagtttatgttccatctgagaagatctccatttcttcaagtgtttaacaacagtcctgatgagtcgtcatattacagacatcattttgcccggcaggacctgacccagtccctcatcatgatccagcccattctctactcttactcctttcatgggccaccagagccagtactcttggatagcagcagcattctagctgacagaattttgctgatggatactttctttcaaattgtcatttatcttggtgagaccatagcccagtggcgtaaagctggctaccaggacatgcccgagtatgaaaacttcaagcaccttctgcaggcaccactggatgatgctcaagaaattctgcaagcacgcttcccgatgccacgttacatcaacacggagcatggaggcagtcaggctcgattccttttgtccaaagtgaacccatctcagacacacaataacctgtatgcttggggacaggaaactggagcacccatcctaactgatgatgttagcctgcaggtgttcatggaccatttgaagaagctggctgtctccagtgcctgttaa

SEQ ID NO: 522 - DNA, 1113 bp, human
atggcgcggcccgggctcattcattccgcgccgggcctgccagacacctgcgcccttctgcagccgcccgccgcatccgccgccgcagcccccagcatgtcgggcccagacgtcgagacgccgtccgccatccagatctgccggatcatgcggccagatgatgccaacgtggccggcaatgtccacggggggaccatcctgaagatgatcgaggaggcaggcgccatcatcagcacccggcattgcaacagccagaacggggagcgctgtgtggccgccctggctcgtgtcgagcgcaccgacttcctgtctcccatgtgcatcggtgaggtggcgcatgtcagcgcggagatcacctacacctccaagcactctgtggaggtgcaggtcaacgtgatgtccgaaaacatcctcacaggtgccaaaaagctgaccaataaggccaccctgtggtatgtgcccctgtcgctgaagaatgtggacaaggtcctcgaggtgcctcctgttgtgtattcccggcaggagcaggaggaggagggccggaagcggtatgaagcccagaagctggagcgcatggagaccaagtggaggaacggggacatcgtccagccagtcctcaacccagagccgaacactgtcagctacagccagtccagcttgatccacctggtggggccttcagactgcaccctgcacggctttgtgcacggaggtgtgaccatgaagctcatggatgaggtcgccgggatcgtggctgcacgccactgcaagaccaacatcgtcacagcttccgtggacgccattaattttcatgacaagatcagaaaaggctgcgtcatcaccatctcgggacgcatgaccttcacgagcaataagtccatggagatcgaggtgttggtggacgccgaccctgttgtggacagctctcagaagcgctaccgggccgccagtgccttcttcacctacgtgtcgctgagccaggaaggcaggtcgctgcctgtgccccagctggtgcccgagaccgaggacgagaagaagcgctttgaggaaggcaaagggcggtacctgcagatgaaggcgaagcgacagggccacgcggagcctcagccctag

SEQ ID NO: 523 - DNA, 2877 bp, human
atggccgaggccaggaagcggcgggagctacttcccctgatctaccaccatctgctgcgggctggctatgtgcgtgcggcgcgggaagtgaaggagcagagcggccagaagtgtttcctggctcagcccgtaacccttctggacatctatacacactggcaacaaacctcagagcttggtcggaagcggaaggcagaggaagatgcggcactgcaagctaagaaaacccgtgtgtcagaccccatcagcacctcggagagctcggaagaggaggaagaagcagaagccgaaaccgccaaagccaccccaagactagcatctaccaactcctcagtcctgggggcggacttgccatcaagcatgaaagaaaaagccaaggcagagacagagaaagctggcaagactgggaattccatgccacaccctgccactgggaagacggtggccaaccttctttctgggaagtctcccaggaagtcagcagagccctcagcaaatactacgttggtctcagaaactgaggaggagggcagcgtcccggcctttggagctgctgccaagcctgggatggtgtcagcgggccaggccgacagctccagcgaggacacctccagctccagtgatgagacagacgtggaggggaaaccctcagtaaaaccagcccaggtcaaagcctcatcagtttctactaaggagtctccagcaagaaaggcggccccagcccctgggaaggtgggggatgtgacaccccaggtcaaaggaggggccctgcccccagccaagagggccaagaagccagaagaggagtcagagagtagtgaggagggatctgaaagtgaggaggaggcccctgcagggacacgaagccaggtaaaggcctctgaaaaaattctccaggtcagagctgcctcagcccctgccaaggggacccctgggaaaggggctaccccagcaccccctgggaaggcaggggctgtagcctcccagaccaaggcagggaagccagaggaggactcagagagcagcagcgaggagtcatctgacagtgaggaggagacgccagctgccaaggccctgcttcaggcgaaggcctcaggaaaaacctctcaggtcggagctgcctcagcccctgccaaggagtcccccaggaaaggagctgccccagcgccccctgggaagacagggcctgcagttgccaaggcccaggcggggaagcgggaggaggactcgcagagcagcagcgaggaatcggacagtgaggaggaggcgcctgctcaggcgaagccttcagggaaggccccccaggtcagagccgcctcggcccctgccaaggagtcccccaggaaaggggctgccccagcacctcctaggaaaacagggcctgcagccgcccaggtccaggtggggaagcaggaggaggactcaagaagcagcagcgaggagtcagacagtgacagagaggcactggcagccatgaatgcagctcaggtgaagcccttggggaaaagcccccaggtgaaacctgcctctaccatgggcatggggcccttggggaaaggcgccggcccagtgccacccgggaaggtggggcctgcaaccccctcagcccaggtggggaagtgggaggaggactcagagagcagtagtgaggagtcatcagacagcagtgatggagaggtgcccacagctgtggccccggctcaggaaaagtccttggggaacatcctccaggccaaacccacctccagtcctgccaaggggccccctcagaaggcagggcctgtagccgtccaggtcaaggctgaaaagcccatggacaactcggagagcagcgaggagtcatcggacagtgcggacagtgaggaggcaccagcagccatgactgcagctcaggcaaaaccagctctgaaaattcctcagaccaaggcctgcccaaagaaaaccaataccactgcatctgccaaggtcgcccctgtgcgagtgggcacccaagccccccggaaagcaggaactgcgacttctccagcaggctcatccccagctgtggctgggggcacccagagaccagcagaggattcttcaagcagtgaggaatcagatagtgaggaagagaagacaggtcttgcagtaaccgtgggacaggcaaagtctgtggggaaaggcctccaggtgaaagcagcctcagtgcctgtcaaggggtccttggggcaagggactgctccagtactccctgggaagacggggcctacagtcacccaggtgaaagctgaaaagcaggaagactctgagagcagtgaggaggaatcagacagtgaggaagcagctgcatctccagcacaggtgaaaacctcagtaaagaaaacccaggccaaagccaacccagctgccgccagagcaccttcagcaaaagggacaatttcagcccctggaaaagttgtcactgcagctgctcaagccaagcagaggtctccatccaaggtgaagccaccagtgagaaacccccagaacagtaccgtcttggcgaggggcccagcatctgtgccatctgtggggaaggccgtggctacagcagctcaggcccagacagggccagaggaggactcagggagcagtgaggaggagtcagacagtgaggaggaggcggagacgctggctcaggtgaagccttcagggaagacccaccagatcagagctgccttggctcctgccaaggagtcccccaggaaaggggctgccccaacacctcctgggaagacagggccttcggctgcccaggcagggaagcaggatgactcagggagcagcagcgaggaatcagacagtgatggggaggcaccggcagctgtgacctctgcccaggaccaggagtcttcttga

SEQ ID NO: 524 - DNA, 786 bp, human
atggaaaaagtcagacgagagggggttaaggtgatgcccaatgctattgtgcaatccgttggagtcagcagtggcaagttacttatcaagctgaaagacggcaggaaggtagaaactgaccacatagtggcagctgtgggcctggagcccaatgttgagttggccaagactggtggcctggaaatagactcagattttggtggcttccgggtaaatgcagagctacaagcacgctctaacatctgggtggcaggagatgctgcatgcttctacgatataaagttgggaaggaggcgggtagagcaccatgatcacgctgttgtgagtggaagattggctggagaaaatatgactggagctgctaagccgtactggcatcagtcaatgttctggagtgatttgggccccgatgttggctatgaagctattggtcttgtggacagtagtttgcccacagttggtgtttttgcaaaagcaactgcacaagacaaccccaaatctgccacagagcagtcaggaactggtatccgatcagagagtgagacagagtccgaggcctcagaaattactattcctcccagcaccccggcagttccacaggctcccgtccagggggaggactacggcaaaggtgtcatcttctacctcagggacaaagtggtcgtggggattgtgctatggaacatctttaaccgaatgccaatagcaaggaagatcattaaggacggtgagcagcatgaagatctcaatgaagtagccaaactattcaacattcatgaagactga

SEQ ID NO: 525 - DNA, 867 bp, human
atggccgagaagcggcacacacgggactccgaagcccagcggctccccgactccttcaaggacagccccagtaagggccttggaccttgcggatggattttggtggcgttctcattcttattcaccgttataactttcccaatctcaatatggatgtgcataaagattataaaagagtatgaaagagccatcatctttagattgggtcgcattttacaaggaggagccaaaggacctggtttgttttttattctgccatgcactgacagcttcatcaaagtggacatgagaactatttcatttgatattcctcctcaggagatcctcacaaaggattcagtgacaattagcgtggatggtgtggtctattaccgcgttcagaatgcaaccctggctgtggcaaatatcaccaacgctgactcagcaacccgtcttttggcacaaactactctgaggaatgttctgggcaccaagaatctttctcagatcctctctgacagagaagaaattgcacacaacatgcagtctactctggatgatgccactgatgcctggggaataaaggtggagcgtgtggaaattaaggatgtgaaactacctgtgcagctccagagagctatggctgcagaagcagaagcgtcccgcgaggcccgcgccaaggttattgcagccgaaggagaaatgaatgcatccagggctctgaaagaagcctccatggtcatcactgaatctcctgcagcccttcagctccgatacctgcagacactgaccaccattgctgctgagaaaaactcaacaattgtcttccctctgcccatagatatgctgcaaggaatcataggggcaaaacacagccatctaggctag

SEQ ID NO: 526 - DNA, 360 bp, human
atgacccagcagggcgcggcgctgcagaactacaacaacgagctggtcaagtgcatagaggagctgtgccagaagcgggaggagctgtgccggcagatccaggaggaggaggacgagaagcagcggctgcagaatgaggtgaggcagctgacagagaagctggcccgcgtcaacgagaacctggcacgcaagattgcctctcgcaacgagttcgaccggaccatcgcggagacggaggccgcctacctcaagatcctggagagctcccagactttgctcagcgttctcaagagggaagctgggaacctgaccaaggctacagccccagaccagaaaagtagcggcggcagggacagctga

SEQ ID NO: 527 - DNA, 765 bp, human
atggccgcctacaaactggtgctgatccggcacggcgagagcgcatggaacctggagaaccgcttcagcggctggtacgacgccgacctgagcccggcgggccacgaggaggcgaagcgcggcgggcaggcgctacgagatgctggctatgagtttgacatctgcttcacctcagtgcagaagagagcgatccggaccctctggacagtgctagatgccattgatcagatgtggctgccagtggtgaggacttggcgcctcaatgagcggcactatgggggtctaaccggtctcaataaagcagaaactgctgcaaagcatggtgaggcccaggtgaagatctggaggcgctcctatgatgtcccaccacctccgatggagcccgaccatcctttctacagcaacatcagtaaggatcgcaggtatgcagacctcacagaagatcagctaccctcctgtgagagtctgaaggatactattgccagagctctgcccttctggaatgaagaaatagttccccagatcaaggaggggaaacgtgtactgattgcagcccatggcaacagcctccggggcattgtcaagcatctggagggtctctctgaagaggctatcatggagctgaacctgccgactggtattcccattgtctatgaattggacaagaacttgaagcctatcaagcccatgcagtttctgggggatgaagagacggtgcgcaaagccatggaagctgtggctgcccagggcaaggccaagaagtga

SEQ ID NO: 528 - DNA, 402 bp, human
atgcagctctttgtccgcgcccaggagctacacaccttcgaggtgaccggccaggaaacggtcgcccagatcaaggctcatgtagcctcactggagggcattgccccggaagatcaagtcgtgctcctggcaggcgcgcccctggaggatgaggccactctgggccagtgcggggtggaggccctgactaccctggaagtagcaggccgcatgcttggaggtaaagtccatggttccctggcccgtgctggaaaagtgagaggtcagactcctaaggtggccaaacaggagaagaagaagaagaagacaggtcgggctaagcggcggatgcagtacaaccggcgctttgtcaacgttgtgcccacctttggcaagaagaagggccccaatgccaactcttaa

SEQ ID NO: 529 - DNA, 2895 bp, human
atggatgaacagagcgtggagagcattgctgaggttttccgatgtttcatttgtatggagaaattgcgggatgcacgcctgtgtcctcattgctccaaactgtgttgtttcagctgtattaggcgctggctgacagagcagagagctcaatgtcctcattgccgtgctccactccagctacgagaactagtaaattgtcgttgggcagaagaagtaacacaacagcttgatactcttcaactctgcagtctcaccaaacatgaagaaaatgaaaaggacaaatgtgaaaatcaccatgaaaaacttagtgtattttgctggacttgtaagaagtgtatctgccatcagtgtgcactttggggaggaatgcatggcggacatacctttaaacctttggcagaaatttatgagcaacacgtcactaaagtgaatgaagaggtagccaaacttcgtcggcgtctcatggaactgatcagcttagttcaagaagtggaaaggaatgtagaagctgtaagaaatgcaaaagatgagcgtgttcgggaaattaggaatgcagtggagatgatgattgcacggttagacacacagctgaagaataagcttataacactgatgggtcagaagacatctctaacccaagaaacagagcttttggaatccttacttcaggaggtggagcaccagttgcggtcttgtagtaagagtgagttgatatctaagagctcagagatccttatgatgtttcagcaagttcatcggaagcccatggcatcttttgttaccactcctgttccaccagactttaccagtgaattagtgccatcttacgattcagctacttttgttttagagaatttcagcactttgcgtcagagagcagatcctgtttacagtccacctcttcaagtttcaggactttgctggaggttaaaagtttacccagatggaaatggagttgtgcgaggttactacttatctgtgtttctggagctctcagctggcttgcctgaaacttctaaatatgaatatcgtgtagagatggttcaccagtcctgtaatgatcctacaaaaaatatcattcgagaatttgcatctgactttgaagttggagaatgctggggctataatagatttttccgtttggacttactcgcaaatgaaggatacttgaatccacaaaatgatacagtgattttaaggtttcaggtacgttcaccaactttctttcaaaaatcccgggaccagcattggtacattactcagttggaagctgcacagactagttatatccaacaaataaacaaccttaaagagagacttactattgagctgtctcgaactcagaagtcaagagatttgtcaccaccagataaccatcttagcccccaaaatgatgatgctctggagacacgagctaagaagtctgcatgctctgacatgcttctcgaaggtggtcctactacagcttctgtaagagaggccaaagaggatgaagaagatgaggagaagattcagaatgaagattatcatcacgagctttcagatggagatctggatctggatcttgtttatgaggatgaagtaaatcagctcgatggcagcagttcctctgctagttccacagcaacaagtaatacagaagaaaatgatattgatgaagaaactatgtctggagaaaatgatgtggaatataacaacatggaattagaagagggagaactcatggaagatgcagctgctgcaggacccgcaggtagtagccatggttatgtgggttccagtagtagaatatcaagaagaacacatttatgctccgctgctaccagtagtttactagacattgatccattaattttaatacatttgttggaccttaaggaccggagcagtatagaaaatttgtggggcttacagcctcgcccacctgcttcacttctgcagcccacagcatcatattctcgaaaagataaagaccaaaggaagcaacaggcaatgtggcgagtgccctctgatttaaagatgctaaaaagactcaaaactcaaatggccgaagttcgatgtatgaaaactgatgtaaagaatacactttcagaaataaaaagcagcagtgctgcttctggagacatgcagacaagccttttttctgctgaccaggcagctctggctgcatgtggaactgaaaactctggcagattgcaggatttgggaatggaactcctggcaaagtcatcagttgccaattgttacatacgaaactccacaaataagaagagtaattcgcccaagccagctcgatccagtgtagcaggtagtctatcacttcgaagagcagtggaccctggagaaaatagtcgttcaaagggagactgtcagactctgtctgaaggctccccaggaagctctcagtctgggagcaggcacagttctccccgagccttgatacatggcagtatcggtgatattctgccaaaaactgaagaccggcagtgtaaagctttggattcagatgctgttgtggttgcagttttcagtggcttgcctgcggttgagaaaaggaggaaaatggtcaccttgggggctaatgctaaaggaggtcatctggaaggactgcagatgactgatttggaaaataattctgaaactggagagttacagcctgtactacctgaaggagcttcagctgcccctgaagaaggaatgagtagcgacagtgacattgaatgtgacactgagaatgaggagcaggaagagcataccagtgtgggcgggtttcacgactccttcatggtcatgacacagcccccggatgaagatacacattccagttttcctgatggtgaacaaataggccctgaagatctcagcttcaatacagatgaaaatagtggaaggtaa

SEQ ID NO: 530 - DNA, 1041 bp, human
atggagtccgtcagttgctccgctgctgctgtcaggaccggagacatggagtcccagcgggacctgagcctggtgcctgagcggcttcagagacgcgaacaagaacggcagctggaagttgaaaggcggaaacaaaagcggcagaaccaggaggtagagaaggagaacagccactttttcgtcgccacctttgctcgggagcgagcggccgtggaagagcttctggagcgcgcggagtcggtcgagcggctggaggaggcggcctctcggctccaggggctgcagaaactaatcaacgactcagtttttttcctagccgcttacgacctgcggcagggacaagaggcgctggcgcggctgcaggcggccttggccgagcggcgccgggggctgcagcccaagaagcgtttcgctttcaagacccggggaaaggatgctgcttcgtctaccaaagtagacgcggctcctggcatccccccggcagttgaaagcatacaggactccccgctgcccaagaaggcggaaggagacctcggccccagctgggtctgcggtttctccaacctggagtcccaagtcttggagaagagagccagcgagttgcaccagcgcgacgttcttttgaccgaactgagcaactgcacggtcagactgtatggaaatcccaacaccctgcggctaaccaaggcccacagctgcaagctgctctgcggtccggtgtctacctctgttttcctggaggactgcagtgactgcgtgctggcagtggcctgccaacagctccgcatacacagtacgaaagacacccgcatcttcctgcaggtgaccagcagggccatcgtggaggactgcagtgggatccagttcgccccttacacctggagctacccggagatcgacaaggacttcgagagctctggtttagataggagcaaaaataactggaacgatgttgacgattttaactggctggcccgggatatggcctccccaaactggagtattcttcctgaagaggagcgaaatatccagtgggactaa

SEQ ID NO: 531 - DNA, 1209 bp, human
atgcctgggcacttacaggaaggcttcggctgcgtggtcaccaaccgattcgaccagttatttgacgacgaatcggaccccttcgaggtgctgaaggcagcagagaacaagaaaaaagaagccggcgggggcggcgttgggggccctggggccaagagcgcagctcaggccgcggcccagaccaactccaacgcggcaggcaaacagctgcgcaaggagtcccagaaagaccgcaagaacccgctgccccccagcgttggcgtggttgacaagaaagaggagacgcagccgcccgtggcgcttaagaaagaaggaataagacgagttggaagaagacctgatcaacaacttcagggtgaagggaaaataattgatagaagaccagaaaggcgaccacctcgtgaacgaagattcgaaaagccacttgaagaaaagggtgaaggaggcgaattttcagttgatagaccgattattgaccgacctattcgaggtcgtggtggtcttggaagaggtcgagggggccgtggacgtggaatgggccgaggagatggatttgattctcgtggcaaacgtgaatttgataggcatagtggaagtgatagatctggcctgaagcacgaggacaaacgtggaggtagcggatctcacaactggggaactgtcaaagacgaattaacagagtcccccaaatacattcagaaacaaatatcttataattacagtgacttggatcaatcaaatgtgactgaggaaacacctgaaggtgaagaacatcatccagtggcagacactgaaaataaggagaatgaagttgaagaggtaaaagaggagggtccaaaagagatgactttggatgagtggaaggctattcaaaataaggaccgggcaaaagtagaatttaatatccgaaaaccaaatgaaggtgctgatgggcagtggaagaagggatttgttcttcataaatcaaagagtgaagaggctcatgctgaagattcggttatggaccatcatttccggaagccagcaaatgatataacgtctcagctggagatcaattttggagaccttggccgcccaggacgtggcggcaggggaggacgaggtggacgtgggcgtggtgggcgcccaaaccgtggcagcaggaccgacaagtcaagtgcttctgctcctgatgtggatgacccagaggcattcccagctctggcttaa

SEQ ID NO: 532 - DNA, 2238 bp, human
atggaggtgatgaacctgatggagcagcctatcaaggtgactgagtggcagcagacatacacctacgactcgggtatccactcgggcgccaacacctgcgtgccctccgtcagcagcaagggcatcatggaggaggatgaggcctgcgggcgccagtacacgctcaagaaaaccaccacttacacccagggggtgccccccagccaaggtgatctggagtaccagatgtccacaacagccagggccaaacgggtgcgggaggccatgtgccctggtgtgtcaggcgaggacagctcgcttctgctggccacccaggtggaggggcaggccaccaacctgcagcgactggccgagccgtcccagctgctcaagtcggccattgtgcatctcatcaactaccaggacgatgccgagctggccactcgcgccctgcccgagctcaccaaactgctcaacgacgaggacccggtggtggtgaccaaggcggccatgattgtgaaccagctgtcgaagaaggaggcgtcgcggcgggccctgatgggctcgccccagctggtggccgctgtcgtgcgtaccatgcagaataccagcgacctggacacagcccgctgcaccaccagcatcctgcacaacctctcccaccaccgggaggggctgctcgccatcttcaagtcgggtggcatccctgctctggtccgcatgctcagctcccctgtggagtcggtcctgttctatgccatcaccacgctgcacaacctgctcctgtaccaggagggcgccaagatggccgtgcgcctggccgacgggctgcaaaagatggtgcccctgctcaacaagaacaaccccaagttcctggccatcaccaccgactgcctgcagctcctggcctacggcaaccaggagagcaagctgatcatcctggccaatggtgggccccaggccctcgtgcagatcatgcgtaactacagttatgaaaagctgctctggaccaccagtcgtgtgctcaaggtgctatccgtgtgtcccagcaataagcctgccattgtggaggctggtgggatgcaggccctgggcaagcacctgaccagcaacagcccccgcctggtgcagaactgcctgtggaccctgcgcaacctctcagatgtggccaccaagcaggagggcctggagagtgtgctgaagattctggtgaatcagctgagtgtggatgacgtcaacgtcctcacctgtgccacgggcacactctccaacctgacatgcaacaacagcaagaacaagacgctggtgacacagaacagcggtgtggaggctctcatccatgccatcctgcgtgctggtgacaaggacgacatcacggagcctgccgtctgcgctctgcgccacctcactagccgccaccctgaggccgagatggcccagaactctgtgcgtctcaactatggcatcccagccatcgtgaagctgctcaaccagcccaaccagtggccactggtcaaggcaaccatcggcttgatcaggaatctggccctgtgcccagccaaccatgccccgctgcaggaggcagcggtcatcccccgcctcgtccaactgctggtgaaggcccaccaggatgcccagcgccacgtagctgcaggcacacagcagccctacacggatggtgtgaggatggaggagattgtggagggctgcaccggagcactgcacatcctcgcccgggaccccatgaaccgcatggagatcttccggctcaacaccattcccctgtttgtgcagctcctgtactcgtcggtggagaacatccagcgcgtggctgccggggtgctgtgtgagctggcccaggacaaggaggcggccgacgccattgatgcagagggggcctcggccccactcatggagttgctgcactcccgcaacgagggcactgccacctacgctgctgccgtcctgttccgcatctccgaggacaagaacccagactaccggaagcgcgtgtccgtggagctcaccaactccctcttcaagcatgacccggctgcctgggaggctgcccagagcatgattcccatcaatgagccctatggagatgacatggatgccacctaccgccccatgtactccagcgatgtgccccttgacccgctggagatgcacatggacatggatggagactaccccatcgacacctacagcgacggcctcaggcccccgtaccccactgcagaccacatgctggcctag

SEQ ID NO: 533 - DNA, 495 bp, human
atgtcggtgaacatggacgagctgcggcaccaggtcatgatcaaccagttcgtgctggccgcgggctgcgcggccgaccaggcgaagcagttgctgcaggcggcccactggcagttcgagaccgcgctgagcacgttcttccaagaaaccaacattcccaacagccaccaccaccaccagatgatgtgcactcccagcaacacccctgccacgccgcccaacttccccgatgcgctggccatgttctccaagctccgcgcctccgagggcctgcagagcagcaacagccccatgacagccgcagcctgctccccacctgcaaacttcagccccttctgggcctcgtccccgcccagccaccaggcgccctggatcccgccctcctcccccaccaccttccaccacctccaccgcccacagcccacgtggcccccaggagcacagcaggggggcgcccagcagaaagccatggcggccatggacggccagagatga

SEQ ID NO: 534 - DNA, 1881 bp, human
atgatccccgccaacgcctccgccaggaaggggcccgagggcaagtatccgctgcactacctcgtgtggcacaaccgccaccgcgagctggagaaggaggtccgcgcgggccaggtggacatcgagcagctggatccccgcggccggactcccctgcacctggccaccacgctggggcaccttgagtgtgcccgtgtgctcctggcgcacggcgcagacgtgggcagggagaatcgcagcggctggacagtgctccaggaggctgtgagtacccgggacctggagctggtgcagctggtgcttcggtaccgggactaccagcgggtggtgaagcggctggcgggcatccccgtgctcctggagaagctgcgcaaggcccaggacttctacgtggagatgaaatgggagttcactagctgggtgcccctggtgtccaagatctgccctagtgacacctacaaagtgtggaagagcggccagaacctgagggtagacaccacactcctgggctttgaccacatgacctggcagcgagggaaccgcagctttgtcttcaggggccaagacacaagcgccgtggtcatggagattgaccacgaccgccgggtggtgtacacagagactctggcactggctgggcaggaccgggagctgctgctggctgctgctcagcccactgaggaacaggtgctgagccggcttaccgcgcccgtcgtcaccactcagcttgacaccaagaatatctcctttgagaggaacaagactggcatcctgggctggcgcagtgaaaagacggagatggtgaatgggtatgaagctaaggtgtatggggcatctaacgtggagctcatcacccgcacacggacagaacatctttcagaacagcacaagggcaaggtcaaaggctgtaagacacctttgcagtccttcctgggaatcgctgagcagcacgggggcccccaaaatgggaccctgatcactcagactctgagccaagccaaccccactgccatcactgcagaagaatacttcaaccccaactttgagctgggcaaccgtgatatgggccgccccatggaactgaccaccaagacacagaagttcaaggccaagctgtggctgtgtgaggagcatcccctgtccctgtgtgagcaggtggcccccatcattgacctcatggccgtcagcaatgcgctttttgccaagctccgggacttcatcaccctgcgtctgcctcctggcttcccagttaagattgaaatcccgatcttccacatcctcaacgcccgcatcaccttcgggaacctcaacggctgcgacgaaccggtgccatcggtgcgaggcagccccagcagcgagacgccttccccaggcagcgactcctccagcgtcagcagctccagctccacgacctcctgccgcggctgcgagatctccccagcgttgttcgaggccccgcgcggctacagcatgatgggcggccagcgggaggcggcgacccgggacgacgacgacgacctgctgcaattcgccatccagcagagcctgcttgaggcgggcagtgagtatgaccaggtcaccatctgggaggcgctaaccaacagcaagccaggcacccaccccatgtcctacgagggtcgccgacaggacaggagcgccccgcccacgccgcagcgccagcctgcgcccccggcgtcagtgcccagccctcggcccagctcagggccaggttccggcggccacgtgttccggagctacgacgagcagctgcggctggcgatggaactgtcggcgcaggagcaggaggagaggcggcggcgcgcgcgccaggaggaggaggagctggagcgcatcctgaggctctcactgaccgagcagtag

SEQ ID NO: 535 - DNA, 2823 bp, human
atgggttcgggtcccatagaccccaaagaacttctcaagggcctggacagcttccttaaccgagatggggaagtcaaaagtgtggatgggatttccaagatcttcagtttgatgaaggaagcacgaaagatggtgagtcgatgcacttacttgaacattctcctgcagacccgttcaccagaaatattggtcaaatttattgacgttggcggctacaaacttcttaacaattggctgacgtattcaaagacaaccaacaacattcccctcctccagcaaattctactgaccctgcagcatctaccgctcactgtagaccatctcaagcagaacaacacagctaaactggtgaagcagctgagcaagtcaagtgaggatgaagagctccggaaattggcctcagtccttgtcagcgactggatggctgtcatccgctctcagagcagtacccagcctgctgagaaagataagaagaaacgtaaagatgaaggaaaaagtcgaactacccttcctgagcgacctttgacagaggtgaaggctgagacccgggctgaggaggccccagagaagaagagggagaagcccaagtctcttcgcaccacagcacccagtcatgccaagttccgttccactggactagagctggagacaccatccttggtgcctgtgaagaagaatgccagcacagtggtggtttctgacaagtacaaccttaaacccatccccctcaaacgtcagagcaacgtagctgctccaggagatgccactccccctgcagagaagaaatacaagccactcaacacaacacctaatgccaccaaagagatcaaagtgaagatcatcccgccacagcctatggagggcctgggctttctggatgctcttaattcagcccctgttccaggcatcaaaattaagaagaaaaaaaaagtactgtcacctacggctgccaagccaagcccctttgaagggaaaacgagcacagaaccaagcacagccaaaccttcttccccagaaccagcaccaccttctgaggcaatggacgcagaccgtccaggcaccccggttccccctgttgaagtcccggagctcatggatacagcctctttggagccaggagctctggatgccaagccagtggagagtcctggagatcctaaccaactgacccggaaaggcaggaagaggaaaagtgtgacatggcctgaggaaggcaaactgagagaatatttctattttgaattggatgaaactgaacgagtaaatgtgaataagatcaaggactttggtgaggcggctaagcgagagatactgtcagaccgacatgcatttgagacagcgcggcgtctgagccatgataacatggaggagaaggtgccctgggtgtgcccccggcccctggttctgccctcacctcttgtcacccctggaagcaatagtcaggagcgatatatccaggctgagcgggagaagggaatccttcaggagctcttcctgaacaaggagagtcctcatgagcctgatcctgagccctacgagcccataccccctaaactcatccccctagatgaggagtgttccatggatgagactccgtatgttgagactctggaacctggggggtcaggtggctcacctgatggggcaggaggctccaagttgcctccagttctggccaatcttatgggaagcatgggtgctggaaagggcccccaaggccctggaggaggaggcattaatgtccaagagatcctcacctccatcatgggtagcccaaacagtcatccttcagaggaactactgaaacaaccagactattcggacaagatcaagcagatgctggtgccacatggactcctaggccctggcccaatagccaatggtttcccaccagggggtcctgggggccccaagggcatgcagcactttccccctggacctgggggacctatgccaggtccccatggaggccctggtgggccagtgggtccacgtcttctgggtcctccaccccctccccggggaggtgatcccttctgggatggcccgggcgaccctatgcggggtggcccaatgcgggggggtccaggaccaggtcctggaccataccatagaggccgaggtggccgaggaggaaacgaacctcctcctcctcctcctccattccgaggcgccagaggaggtcgctctggaggaggacccccaaatggacgagggggccctggtgggggcatggttggaggtggtgggcatcgtcctcacgaaggccctggtgggggcatgggcaacagcagtggacatcgtccccacgaaggccctggcggtggcatgggaagtgggcatcgcccccatgaaggccctggtggtagcatgggtgggggtggaggacatcgtccccacgaaggccctggcggtggcatcagtggtggcagtggccatcgtccccatgaaggccctggcggaggaatgggtgccggtggtggacatcgcccccacgaaggccctggcggaagcatgggtggaagtggtggacatcgtccccatgaaggccctggacacggggggccccatggccaccggcctcatgatgtccctggtcaccgaggccatgaccatcgagggccgccacctcatgagcaccgtggccatgatggtcctggccacgggggagggggccaccgagggcacgatggaggccacagccatggaggagacatgtcaaaccgccctgtctgccgacatttcatgatgaagggcaactgccgctatgagaacaactgtgccttctaccacccgggtgtcaatgggccccccctgccctag

SEQ ID NO: 536 - DNA, 777 bp, human
atggccgcgccggccccgggcctcatctcggtgttctcgagttcccaggagctgggtgcggcgctagcgcagctggtggcccagcgcgcagcatgctgcctggcaggggcccgcgcccgtttcgcgctcggcctgtcgggcgggagcctcgtctcgatgctagcccgcgagctacccgccgccgtcgcccctgccgggccagctagcttagcgcgctggacgctgggcttctgcgacgagcgcctcgtgcccttcgatcacgccgagagcacgtacggcctctaccggacgcatcttctctccagactgccgatcccagaaagccaggtgatcaccattaaccccgagctgcctgtggaggaggcggctgaggactacgccaagaagctgagacaggcattccaaggggactccatcccggttttcgacctgctgatcctgggggtgggccccgatggtcacacctgctcactcttcccagaccaccccctcctacaggagcgggagaagattgtggctcccatcagtgactccccgaagccaccgccacagcgtgtgaccctcacactacctgtcctgaatgcagcacgaactgtcatctttgtggcaactggagaaggcaaggcagctgttctgaagcgcattttggaggaccaggaggaaaacccgctgcccgccgccctggtccagccccacaccgggaaactgtgctggttcttggacgaggcggccgcccgcctcctgaccgtgcccttcgagaagcattccactttgtag

SEQ ID NO: 537 - DNA, 2010 bp, human
atggggaccgcgcttgtgtaccatgaggacatgacggccacccggctgctctgggacgaccccgagtgcgagatcgagcgtcctgagcgcctgaccgcagccctggatcgcctgcggcagcgcggcctggaacagaggtgtctgcggttgtcagcccgcgaggcctcggaagaggagctgggcctggtgcacagcccagagtatgtatccctggtcagggagacccaggtcctaggcaaggaggagctgcaggcgctgtccggacagttcgacgccatctacttccacccgagtacctttcactgcgcgcggctggccgcaggggctggactgcagctggtggacgctgtgctcactggagctgtgcaaaatgggcttgccctggtgaggcctcccgggcaccatggccagagggcggctgccaacgggttctgtgtgttcaacaacgtggccatagcagctgcacatgccaagcagaaacacgggctacacaggatcctcgtcgtggactgggatgtgcaccatggccaggggatccagtatctctttgaggatgaccccagcgtcctttacttctcctggcaccgctatgagcatgggcgcttctggcctttcctgcgagagtcagatgcagacgcagtggggcggggacagggcctcggcttcactgtcaacctgccctggaaccaggttgggatgggaaacgctgactacgtggctgccttcctgcacctgctgctcccactggcctttgagtttgaccctgagctggtgctggtctcggcaggatttgactcagccatcggggaccctgaggggcaaatgcaggccacgccagagtgcttcgcccacctcacacagctgctgcaggtgctggccggcggccgggtctgtgccgtgctggagggcggctaccacctggagtcactggcggagtcagtgtgcatgacagtacagacgctgctgggtgacccggccccacccctgtcagggccaatggcgccatgtcagagtgccctagagtccatccagagtgcccgtgctgcccaggccccgcactggaagagcctccagcagcaagatgtgaccgctgtgccgatgagccccagcagccactccccagaggggaggcctccacctctgctgcctgggggtccagtgtgtaaggcagctgcatctgcaccgagctccctcctggaccagccgtgcctctgccccgcaccctctgtccgcaccgctgttgccctgacaacgccggatatcacattggttctgccccctgacgtcatccaacaggaagcgtcagccctgagggaggagacagaagcctgggccaggccacacgagtccctggcccgggaggaggccctcactgcacttgggaagctcctgtacctcttagatgggatgctggatgggcaggtgaacagtggtatagcagccactccagcctctgctgcagcagccaccctggatgtggctgttcggagaggcctgtcccacggagcccagaggctgctgtgcgtggccctgggacagctggaccggcctccagacctcgcccatgacgggaggagtctgtggctgaacatcaggggcaaggaggcggctgccctatccatgttccatgtctccacgccactgccagtgatgaccggtggtttcctgagctgcatcttgggcttggtgctgcccctggcctatggcttccagcctgacctggtgctggtggcgctggggcctggccatggcctgcagggcccccacgctgcactcctggctgcaatgcttcgggggctggcagggggccgagtcctggccctcctggaggagaactccacaccccagctagcagggatcctggcccgggtgctgaatggagaggcacctcctagcctaggcccttcctctgtggcctccccagaggacgtccaggccctgatgtacctgagagggcagctggagcctcagtggaagatgttgcagtgccatcctcacctggtggcttga

SEQ ID NO: 538 - DNA, 633 bp, human
atggcgaccgagacggtggagctccataagctaaagcttgccgaactaaagcaagaatgtcttgctcgtggtttggagaccaagggaataaagcaagatcttatccacagactccaggcatatcttgaagaacatgctgaagaggaggcaaatgaagaagatgtactgggagatgaaacagaggaagaagaaacaaagcccattgagctccctgtcaaagaggaagaaccccctgaaaaaactgttgatgtggcagcagagaagaaagtggtgaaaattacatctgaaataccacagactgagagaatgcagaagagggctgaacgattcaatgtacctgtgagcttggagagtaagaaagctgctcgggcagctaggtttgggatttcttcagttccaacaaaaggtctgtcatctgataacaaacctatggttaacttggataagctgaaggaaagagctcaaagatttggtttgaatgtctcttcaatctccagaaagtctgaagatgatgagaaactgaaaaagaggaaggagcgatttgggattgtcacaagttcagctggaactggaaccacagaggatacagaggcaaagaagaggaaaagagcagagcgctttgggattgcctga

SEQ ID NO: 539 - DNA, 1038 bp, human
atgcaacgcctggtggcctgggacccagcatgtctccccctgccgccgccgccgcctgcctttaaatccatggaagtggccaacttctactacgaggcggactgcttggctgctgcgtacggcggcaaggcggcccccgcggcgccccccgcggccagacccgggccgcgcccccccgccggcgagctgggcagcatcggcgaccacgagcgcgccatcgacttcagcccgtacctggagccgctgggcgcgccgcaggccccggcgcccgccacggccacggacaccttcgaggcggctccgcccgcgcccgcccccgcgcccgcctcctccgggcagcaccacgacttcctctccgacctcttctccgacgactacgggggcaagaactgcaagaagccggccgagtacggctacgtgagcctggggcgcctgggggccgccaagggcgcgctgcaccccggctgcttcgcgcccctgcacccaccgcccccgccgccgccgccgcccgccgagctcaaggcggagccgggcttcgagcccgcggactgcaagcggaaggaggaggccggggcgccgggcggcggcgcaggcatggcggcgggcttcccgtacgcgctgcgcgcttacctcggctaccaggcggtgccgagcggcagcagcgggagcctctccacgtcctcctcgtccagcccgcccggcacgccgagccccgctgacgccaaggcgcccccgaccgcctgctacgcgggggccgcgccggcgccctcgcaggtcaagagcaaggccaagaagaccgtggacaagcacagcgacgagtacaagatccggcgcgagcgcaacaacatcgccgtgcgcaagagccgcgacaaggccaagatgcgcaacctggagacgcagcacaaggtcctggagctcacggccgagaacgagcggctgcagaagaaggtggagcagctgtcgcgcgagctcagcaccctgcggaacttgttcaagcagctgcccgagcccctgctcgcctcctccggccactgctag

SEQ ID NO: 540 - DNA, 2061 bp, human
atgcagttaggggagcagctcttggtgagctcagtgaacctgcctggcgcgcacttctacccgctggagagtgcgcgaggcggcagcggcgggagcgctggccacctccccagcgcggccccctctcctcagaagttggacttagacaaagcgtccaagaagttttccggcagtctctcctgcgaggcggtgagcggggagcccgcagccgccagcgcaggggcccccgcggccatgcttagtgacaccgacgccggggacgcatttgccagcgctgcggcagtggccaagccggggcccccggacggccgcaagggctccccctgcggggaggaggagctgccctccgccgctgcagccgccgccgccgccgccgccgcggctgcggccactgcgcgctactccatggacagcctgagctccgagcggtactacctccagtcccccggtcctcaggggtcggagctggctgcgccctgctcactcttcccgtaccaggcggcggctggggcgccccacggacctgtgtacccggctcctaacggggcgcgctacccctacggctccatgctgccccccggcggcttccccgcggctgtgtgcccacccgggagggcgcagttcggcccaggagccggtgcgggcagtggcgcgggcggtagcagcggcgggggcggcggcccgggcacctatcagtacagccagggggctccgctctacgggccgtaccctggagccgcagcggcgggatcttgcggaggactggggggcctgggggttccaggttctggcttccgtgcccacgtctacctgtgcaaccggcctctgtggctcaaattccaccgccaccaaactgagatgatcattacgaaacagggcaggcgcatgtttcctttcttgagcttcaacataaacggactcaatcccactgcccactacaatgtgttcgtagaggtggtgctggcggaccccaaccactggcgcttccaggggggcaaatgggtgacctgtggcaaagccgacaataacatgcagggcaacaaaatgtatgttcacccagagtctcctaatactggttcccactggatgagacaggagatttcattcgggaaattaaaactcaccaataacaaaggcgcaaataacaacaacacccagatgatagtcttacaatccttacacaaataccaaccccgactgcatattgttgaagttacagaggatggcgtggaggacttgaatgagccctcaaagacccagacttttaccttctcagaaacgcaattcattgcagtgactgcctaccaaaacaccgatattactcaactaaagattgatcataacccctttgcaaaaggcttcagagacaactatgattcatcccatcagattgtccctggaggtcggtacggcgttcaatccttcttcccggagccctttgtcaacactttacctcaagcccgctattataatggcgagagaaccgtgccacagaccaacggcctcctttcaccccaacagagcgaagaggtggccaaccctccccagcggtggcttgtcacgcctgtccagcaacctgggaccaacaaactagacatcagttcctatgaatctgaatatacttctagcacattgctcccatatggcattaaatccttgccccttcagacatcccatgccctggggtattacccagacccaacctttcctgcaatggcagggtggggaggtcgaggttcttaccagaggaagatggcagctggactaccatggacctccagaacaagccccactgtgttctctgaagatcagctctccaaggagaaagtgaaagaggaaattggctcttcttggatagagacacccccttccatcaaatctctagattccaatgattcaggagtatacaccagtgcttgtaagcgaaggcggctgtctcctagcaactccagtaatgaaaattcaccctccataaagtgtgaggacattaatgctgaagagtatagtaaagacacctcaaaaggcatgggagggtattatgctttttacacaactccctaa

SEQ ID NO: 541 - DNA, 945 bp, human
atggggctggaggcggcgcgcgagctggagtgcgcggcgctgggcacgctgctgcgggatccgcgggaggcggaacgcacgctgctgctggactgccgccccttcctggccttctgccggcgccacgtgcgcgccgcgcggccagtgccttggaacgcgctgctgcggcgccgcgcgcgcggccctcctgccgccgttctcgcctgcctgctgcccgaccgcgcgctgcggacgcgcctggtccgcggggagctggcgcgggccgtggtgctggacgagggcagtgcctcggtggcggagctccggcccgacagcccggctcatgtgctgctggccgcgctgctgcacgagacccgcgcggggcccactgccgtgtacttcctgcgaggaggcttcgacggcttccagggctgctgtcccgatctgtgctctgaggcccccgcccctgcgctgccgccaacaggggacaaaaccagccgctccgactccagggctcctgtctacgaccagggtggccctgtggagatcttgccctacctgttcctgggcagctgcagtcactcgtcagacctgcaggggctgcaggcctgtggcatcacagccgtcctcaacgtgtccgccagctgccccaaccactttgagggccttttccgctacaagagtatccctgtggaggacaaccagatggtggagatcagtgcctggttccaggaggccataggcttcattgactgggtgaagaacagcggaggccgggtgctggtgcactgccaggcgggtatctcgcgctctgccaccatctgtctggcatacctcatgcagagtcgccgtgtgcggctggacgaggcctttgacttcgttaagcagcgccggggggtcatctcccccaacttcagtttcatggggcagctgctgcagtttgagacccaggtgctgtgtcactga

SEQ ID NO: 542 - DNA, 444 bp, human
atggcttctcatcgtctgctcctcctctgccttgctggactggtatttgtgtctgaggctggccctacgggcaccggtgaatccaagtgtcctctgatggtcaaagttctagatgctgtccgaggcagtcctgccatcaatgtggccgtgcatgtgttcagaaaggctgctgatgacacctgggagccatttgcctctgggaaaaccagtgagtctggagagctgcatgggctcacaactgaggaggaatttgtagaagggatatacaaagtggaaatagacaccaaatcttactggaaggcacttggcatctccccattccatgagcatgcagaggtggtattcacagccaacgactccggcccccgccgctacaccattgccgccctgctgagcccctactcctattccaccacggctgtcgtcaccaatcccaaggaatga

SEQ ID NO: 543 - DNA, 1128 bp, human
atgtcgcagcccaagaaaagaaagcttgagtcggggggcggcggcgaaggaggggagggaactgaagaggaagatggcgcggagcgggaggcggccctggagcgaccccggaggactaagcgggaacgggaccagctgtactacgagtgctactcggacgtttcggtccacgaggagatgatcgcggaccgcgtccgcaccgatgcctaccgcctgggtatccttcggaactgggcagcactgcgaggcaagacggtactggacgtgggcgcgggcaccggcattctgagcatcttctgtgcccaggccggggcccggcgcgtgtacgcggtagaggccagcgccatctggcaacaggcccgggaggtggtgcggttcaacgggctggaggaccgggtgcacgtcctgccgggaccagtggagactgtagagttgccggaacaggtggatgccatcgtgagcgagtggatgggctacggactcctgcacgagtccatgctgagctccgtcctccacgcgcgaaccaagtggctgaaggagggcggtcttctcctgccggcctccgccgagctcttcatagtccccatcagcgaccagatgctggaatggcgcctgggcttctggagccaggtgaagcagcactatggtgtggacatgagctgcctggagggcttcgccacgcgctgtctcatgggccactcggagatcgttgtgcagggattgtccggcgaggacgtgctggcccggccgcagcgctttgctcagctagagctctcccgcgccggcttggagcaggagctggaggccggagtgggcgggcgcttccgctgcagctgctatggctcggcgcccatgcatggctttgccatctggttccaggtgaccttccctggaggggagtcggagaaacccctggtgctgtccacctcgccttttcacccggccactcactggaaacaggcgctcctctacctgaacgagccggtgcaagtggagcaagacacggacgtttcaggagagatcacgctgctgccctcccgggacaacccccgtcgcctgcgcgtgctgctgcgctacaaagtgggagaccaggaggagaagaccaaagactttgccatggaggactga

SEQ ID NO: 544 - DNA, 3234 bp, human
atgactgcggagctgcagcaggacgacgcggccggcgcggcagacggccacggctcgagctgccaaatgctgttaaatcaactgagagaaatcacaggcattcaggacccttcctttctccatgaagctctgaaggccagtaatggtgacattactcaggcagtcagccttctcactgatgagagagttaaggagcccagtcaagacactgttgctacagaaccatctgaagtagaggggagtgctgccaacaaggaagtattagcaaaagttatagaccttactcatgataacaaagatgatcttcaggctgccattgctttgagtctactggagtctcccaaaattcaagctgatggaagagatcttaacaggatgcatgaagcaacctctgcagaaactaaacgctcaaagagaaaacgctgtgaagtctggggagaaaaccccaatcccaatgactggaggagagttgatggttggccagttgggctgaaaaatgttggcaatacatgttggtttagtgctgttattcagtctctctttcaattgcctgaatttcgaagacttgttctcagttatagtctgccacaaaatgtacttgaaaattgtcgaagtcatacagaaaagagaaatatcatgtttatgcaagagcttcagtatttgtttgctctaatgatgggatcaaatagaaaatttgtagacccgtctgcagccctggatctattaaagggagcattccgatcatctgaggaacagcagcaagatgtgagtgaattcacacacaagctcctggattggctagaggacgcattccagctagctgttaatgttaacagtcccaggaacaaatctgaaaatccaatggtgcagctgttctatggtactttcctgactgaaggggttcgtgaaggaaaacccttttgtaacaatgagaccttcggccagtatcctcttcaggtaaacggttatcgcaacttagacgagtgtttggaaggggccatggtggagggtgatgttgagcttcttccctccgatcactcggtgaagtatggacaagagcgttggtttacaaagctacctccagtgttgacctttgaactctcaagatttgagtttaatcagtcccttgggcagccagagaaaattcacaataagctggaatttcctcagattatttatatggacaggtacatgtacaggagcaaggagcttattcgaaataagagagagtgtattcgaaagttgaaggaggaaataaaaattctgcagcaaaaattggaaaggtatgtgaaatatggctcaggcccagctcggttcccgctcccggacatgctgaaatatgttattgaatttgctagtacaaaacctgcctcagaaagctgtccacctgaaagtgacacacatatgacattaccactttcttcagtgcactgctcggtttctgaccagacatccaaggaaagtacaagtacagaaagctcttctcaggatgttgaaagtaccttttcttctcctgaagattctttacccaagtctaaaccactgacatcttctcggtcttccatggaaatgccttcacagccagctccacgaacagtcacagatgaggagataaattttgttaagacctgtcttcagagatggaggagtgagattgaacaagatatacaagatttaaagacttgtattgcaagtactactcagactattgaacagatgtactgcgatcctctccttcgtcaggtgccttatcgcttgcatgcagttcttgttcatgaaggacaagcaaatgctggacactattgggcctatatctataatcaaccccgacagagctggctcaagtacaatgacatctctgttactgaatcttcctgggaagaagttgaaagagattcctatggaggcctgagaaatgttagtgcttactgtctgatgtacattaatgacaaactaccctacttcaatgcagaggcagccccaactgaatcagatcaaatgtcagaagtggaagccctatctgtggaactcaagcattacattcaggaggataactggcggtttgagcaggaagtagaggagtgggaagaagagcagtcttgcaaaatccctcaaatggagtcctccaccaactcctcatcacaggactactctacatcacaagagccttcagtagcctcttctcatggggttcgctgcttgtcgtctgagcatgctgtgattgtaaaggagcaaactgcccaggctattgcaaacacagcccgtgcctatgagaagagcggtgtagaagcggcactgagtgaggtgatgctgagccctgccatgcaaggggtcatcctggccatagctaaagcccgtcagacctttgaccgagatgggtctgaagcagggctgattaaggcattccatgaagaatactccaggctctatcagcttgccaaagagacccccacctctcacagtgatcctcgacttcagcatgtccttgtctactttttccaaaatgaagcacccaaaagggtagtagaacgaacccttctggaacagtttgcagataaaaatcttagctatgatgaaagatcaatcagcattatgaaggtggctcaagcgaaactgaaggaaattggtccagatgacatgaatatggaagagtacaagaagtggcatgaagattatagtttgttccgaaaagtgtctgtgtatctcctaacaggcctagaactctatcaaaaaggaaagtaccaagaggcactttcctacctggtatatgcctaccagagcaatgctgccctgctgatgaaggggccccgccggggggtcaaagaatccgtgattgctttataccgaagaaaatgccttctggagctgaatgccaaagcagcttctctttttgaaacaaatgatgatcactccgtaactgagggcattaatgtgatgaatgaactgatcatcccctgcattcaccttatcattaataatgacatttccaaggatgatctggatgccattgaggtcatgagaaaccattggtgctcttaccttgggcaagatattgcagaaaatctgcagctgtgcctaggggagtttctacccagacttctagatccttctgcagaaatcatcgtcttgaaagagcctccaactattcgacccaattctccctatgacctatgtagccgatttgcagctgtcatggagtcaattcagggagtttcaactgtgacagtgaaataa

SEQ ID NO: 545 - DNA, 345 bp, human
atggtgatccgtgtatatattgcatcttcctctggctctacagcgattaagaagaaacaacaagatgtgcttggtttcctagaagccaacaaaataggatttgaagaaaaagatattgcagccaatgaagagaatcggaagtggatgagagaaaatgtacctgaaaatagtcgaccagccacaggttaccccctgccacctcagattttcaatgaaagccagtatcgcggggactatgatgccttctttgaagccagagaaaataatgcagtgtatgccttcttaggcttgacagccccacctggttcaaaggaagcagaagtgcaagcaaagcagcaagcatga

SEQ ID NO: 546 - DNA, 939 bp, human
atggcccagccctacccccccgcccagtacccccctccgccacagaacggcatccctgccgagtacgccccgcccccaccgcaccccacgcaggactactccggccagaccccggtccccacagagcatggcatgaccctgtacacaccagcacagacccaccccgagcagccaggctccgaggccagcacacagcccatcgccgggacccagacagtgccgcagacagacgaggcggcacagacggacagccagccgctccacccctccgaccctacagagaagcagcagcccaagcggctacacgtctccaacatccccttccggttcagggaccccgacttgcggcaaatgttcgggcaattcggaaaaattttagacgtggagatcatttttaacgagcggggctccaagggttttgggtttgtaacttttgaaactagctcagatgctgaccgagcccgggagaagctgaatgggacgatcgtagagggacggaaaattgaggtcaataatgccacggcccgagtgatgaccaacaagaagacggggaacccctacaccaacggctggaagctaaatccagtggtcggcgcagtctacgggcctgaattctatgcagtgacggggttcccctaccccaccaccggcacagccgttgcctaccggggcgcacatcttcggggccggggccgggccgtgtataatacatttcgggctgcgccacccccaccccccatcccgacttacggagcggtcgtgtatcaggatggattttatggtgctgagatttatggaggctacgcagcctacagatacgctcagcccgctgcagcggcggcagcctacagcgacagttacggcagagtctacgcagctgccgacccgtaccatcacaccatcgggcccgcggcgacctacagcattggaaccatgtga

SEQ ID NO: 547 - DNA, 1026 bp, human
atgccaaagaggaaagtgaccttccaaggcgtgggagatgaggaggatgaggatgaaatcattgtccccaagaagaagctggtggaccctgtggctgggtcagggggtcctgggagccgctttaaaggcaaacactctttggatagcgatgaggaggaggatgatgatgatggggggtccagcaaatatgacatcttggcctcagaggatgtagaaggtcaggaggcagccacactccccagcgaggggggtgttcggatcacaccctttaacctgcaggaggagatggaggaaggccactttgatgccgatggcaactacttcctgaaccgggatgctcagatccgagacagctggctggacaacattgactgggtgaagatccgggagcggccacctggccagcgccaggcctcagactcggaggaggaggacagcttgggccagacctcaatgagtgcccaagccctcttggagggacttttggagctcctattgcctagagagacagtggctggggcactgaggcgtctgggggcccgaggaggaggcaaagggagaaaggggcctgggcaacccagttcccctcagcgcctggaccggctctccgggttggccgaccagatggtggcccggggcaaccttggtgtgtaccaggaaacaagggaacggttggctatgcgtctgaagggtttggggtgtcagaccctaggaccccacaatcccacacccccaccctccctggacatgttcgctgaggagttggcggaggaggaactggagaccccaacccctacccagagaggagaagcagagtcgcggggagatggtctggtggatgtgatgtgggaatataagtgggagaacacgggggatgccgagctgtatgggcccttcaccagcgcccagatgcagacctgggtgagtgaaggctacttcccggacggtgtttattgccggaagctggacccccctggtggtcagttctacaactccaaacgcattgactttgacctctacacctga

SEQ ID NO: 548 - DNA, 1023 bp, human
atggggcccccccattctgggccggggggcgtgcgagtcggggccctgctgctgctgggggttttggggctggtgtctgggctcagcctggagcctgtctactggaactcggcgaataagaggttccaggcagagggtggttatgtgctgtaccctcagatcggggaccggctagacctgctctgcccccgggcccggcctcctggccctcactcctctcctaattatgagttctacaagctgtacctggtagggggtgctcagggccggcgctgtgaggcaccccctgccccaaacctccttctcacttgtgatcgcccagacctggatctccgcttcaccatcaagttccaggagtatagccctaatctctggggccacgagttccgctcgcaccacgattactacatcattgccacatcggatgggacccgggagggcctggagagcctgcagggaggtgtgtgcctaaccagaggcatgaaggtgcttctccgagtgggacaaagtccccgaggaggggctgtcccccgaaaacctgtgtctgaaatgcccatggaaagagaccgaggggcagcccacagcctggagcctgggaaggagaacctgccaggtgaccccaccagcaatgcaacctcccggggtgctgaaggccccctgccccctcccagcatgcctgcagtggctggggcagcaggggggctggcgctgctcttgctgggcgtggcaggggctgggggtgccatgtgttggcggagacggcgggccaagccttcggagagtcgccaccctggtcctggctccttcgggaggggagggtctctgggcctggggggtggaggtgggatgggacctcgggaggctgagcctggggagctagggatagctctgcggggtggcggggctgcagatccccccttctgcccccactatgagaaggtgagtggtgactatgggcatcctgtgtatatcgtgcaggatgggcccccccagagccctccaaacatctactacaaggtatga

SEQ ID NO: 549 - DNA, 861 bp, human
atggcggcgcgagtgctgcgcgcccgcggagcggcctgggccggcggcctcctgcagcgggcggccccctgcagcctcctgcccaggctccggacatggacatcttccagcaacagatctcgagaagacagctggctaaaatccttatttgtccggaaagttgatccaagaaaagatgcccactccaatctcctagccaaaaaggaaacaagcaatctatacaaattacagtttcacaatgttaaaccggaatgcctagaagcatacaacaaaatttgtcaagaggtgttgccaaagattcacgaagataaacactacccttgtactttggtggggacttggaacacgtggtatggcgagcaggaccaagctgtccacctctggaggtatgaaggaggctatccagccctcacagaagtcatgaataaactcagagaaaataaggaatttttggaatttcgtaaggcaagaagtgacatgcttctctccaggaagaatcagctcctgttggagttcagtttctggaatgagcctgtgccaagatccggacctaatatatatgaactcaggtcttaccaactccgaccaggaaccatgattgaatggggcaattactgggctcgtgcaatccgcttcagacaggatggtaacgaagccgtcggaggattcttctctcagattgggcagctgtacatggtgcaccatctttgggcttacagggatcttcagaccagggaagacatacggaatgcagcatggcacaaacatggctgggaggaattggtatattacacagttccacttattcaggaaatggaatccagaatcatgatcccactgaagacctcgcccctccagtaa

SEQ ID NO: 550 - DNA, 1956 bp, human
atgtccggggtgcgcgcagtgcggatcagcatcgaatcggcctgcgagaagcaggtccatgaggtgggcctggatggcaccgagacgtacctgcccccgctgtccatgtcgcagaatctggcgcgtctggcccagcggatagacttcagccagggttcgggctccgaggaggaggaggcggcggggaccgagggcgacgcgcaggagtggccgggcgccgggtccagcgcagaccaggacgacgaggaaggagtggtaaaatttcagccttccctttggccttgggactcagtgaggaacaatttgagaagtgccctgacagagatgtgtgttctctatgatgttctcagtattgttagggataaaaaatttatgactcttgatcctgtctctcaggatgcacttcctccaaaacagaatcctcagacgttgcaattgatatctaaaaagaagtcacttgctggagcagcacaaatcttattgaagggggcagaaagactgactaaatcagttaccgaaaaccaagaaaacaagctacaaagagacttcaattctgagcttttgcgattacggcaacactggaaacttcgaaaagttggagataaaattctcggagatctgagctacagaagtgcaggatctctctttcctcatcatggtacatttgaagtaataaagaatacagatctcgatctggataaaaagatacctgaagattactgtcctcttgatgtccaaattcctagtgatttagaggggtctgcatatatcaaggtttcaatacaaaaacaggctccagatataggtgacctcggcacagttaacctcttcaaacgacctttgcccaaatccaaaccaggttccccacattggcagacaaaattagaagcggcacagaatgttctcttatgtaaagaaatttttgcacagctctctcgggaagctgttcaaattaaatcacaagtccctcacattgtggtgaaaaaccagattatctctcagccctttccgagcttgcagttatctatttctttgtgccattcctcaaatgataagaaatcccaaaaatttgctactgagaagcaatgtccggaggaccacctttatgtcctagagcataatttgcatctactgattagagagtttcataaacagaccttgagttccatcatgatgcctcatccagcaagtgcaccttttggccacaagagaatgagactttcgggtcctcaagcttttgataaaaatgaaattaattcattacagtccagtgaagggcttctggaaaaaataattaaacaagcaaagcatatttttctaaggagtagagctgctgcaaccattgacagcttagcaagccgaattgaggatcctcagatacaggctcattggtcaaatatcaatgatgtttatgaatctagtgtgaaagttttaatcacatcacaaggctatgaacaaatatgcaagtccattcaactgcaattgaatattggagttgagcagattcgagttgtacatagagatggaagagtaattacactgtcttatcaggagcaggagctacaggattttcttctgtctcagatgtcacagcaccaggtacatgcagttcagcaactcgccaaggttatgggctggcaagtactgagcttcagtaatcatgtgggacttggacctatagagagcattggtaatgcatctgccatcacggtggcctccccaagtggtgactatgctatttcagttcgtaatggacctgaaagtggcagcaagattatggttcagtttcctcgtaaccaatgtaaagaccttccaaaaagtgatgttttacaagataacaaatggagtcatcttcgtgggccattcaaagaagttcagtggaataaaatggaaggtcgaaattttgtttataaaatggagctgcttatgtctgcacttagcccttgtctactatga

SEQ ID NO: 551 - DNA, 1062 bp, human
atgtctactttactgctcaatctggattttggggaacctcctcccaaaaaggcattagaaggaaatgccaagcaccgaaattttgtcaagaagcggaggctcttagaacggagaggctttctgagtaaaaagaaccaaccccctagcaaggcgcctaagttgcactctgaaccttcaaagaaaggggagactcctacggtcgatggcacttggaagaccccttccttcccaaaaaagaagacagctgcttccagcaatgggtcaggacagcccctggacaagaaagctgcagtgtcttggttgacccctgccccttcaaaaaaggctgattctgttgctgctaaagtagatttgctgggggagttccagagtgcccttccaaagatcaatagccacccaacccgctctcagaagaagagctcccagaagaaatcctctaaaaagaaccatcctcagaagaatgccccacagaactccacccaagctcattcagagaataaatgctccggagcatcccagaagttgccacggaagatggtggcaattgactgtgagatggtgggcacaggaccaaaggggcatgttagttccttggctcgatgtagcattgtcaactacaacggagatgtgctttatgacgagtacattcttcccccctgccacattgtggactaccgaaccaggtggagtggtatccggaagcagcacatggtgaatgccacacccttcaagattgctcgaggccagatcttgaagatactcacagggaagatagtggtggggcatgccatccacaacgacttcaaagcccttcagtactttcaccccaaatccctcacccgtgacacctcccatatcccccccctcaaccggaaggctgactgcccggagaatgccaccatgtctctgaagcatctcaccaagaagctgctaaaccgggatatccaggttgggaagagcggacattcctctgtggaagatgcccaggccaccatggagctatataagttggttgaagtcgagtgggaagagcacctagcccggaatccccctacagactag

SEQ ID NO: 552 - DNA, 558 bp, human
atgctaacgctagcaagtaaactgaagcgtgacgatggtctcaaagggtcccggacggcagccacagcgtccgactcgactcggagggtttctgtgagagacaaattgcttgttaaagaggttgcagaacttgaagctaatttaccttgtacatgtaaagtgcattttcctgatccaaacaagcttcattgttttcagctaacagtaaccccagatgagggttactaccagggtggaaaatttcagtttgaaactgaagttcccgatgcgtacaacatggtgcctcccaaagtgaaatgcctgaccaagatctggcaccccaacatcacagagacaggggaaatatgtctgagtttattgagagaacattcaattgatggcactggctgggctcccacaagaacattaaaggatgtcgtttggggattaaactctttgtttactgatcttttgaattttgatgatccactgaatattgaagctgcagaacatcatttgcgggacaaggaggacttccggaataaagtggatgactacatcaaacgttatgccagatga

SEQ ID NO: 553 - DNA, 1857 bp, human
atgcacaaaactgcctcccaaagacttttcccaggtccctcgtatcaaaacattaagagtataatggaagatagcacgatcttgtcagattggacaaacagcaacaaacaaaaaatgaagtatgacttttcctgtgaactctacagaatgtctacatattcaactttccccgccggggtgcctgtctcagaaaggagtcttgctcgtgctggtttttattatactggtgtgaatgacaaggtcaaatgcttctgttgtggcctgatgctggataactggaaactaggagacagtcctattcaaaagcataaacagctatatcctagctgtagctttattcagaatctggtttcagctagtctgggatccacctctaagaatacgtctccaatgagaaacagttttgcacattcattatctcccaccttggaacatagtagcttgttcagtggttcttactccagcctttctccaaaccctcttaattctagagcagttgaagacatctcttcatcgaggactaacccctacagttatgcaatgagtactgaagaagccagatttcttacctaccatatgtggccattaacttttttgtcaccatcagaattggcaagagctggtttttattatataggacctggagatagggtagcctgctttgcctgtggtgggaagctcagtaactgggaaccaaaggatgatgctatgtcagaacaccggaggcattttcccaactgtccatttttggaaaattctctagaaactctgaggtttagcatttcaaatctgagcatgcagacacatgcagctcgaatgagaacatttatgtactggccatctagtgttccagttcagcctgagcagcttgcaagtgctggtttttattatgtgggtcgcaatgatgatgtcaaatgcttttgttgtgatggtggcttgaggtgttgggaatctggagatgatccatgggtagaacatgccaagtggtttccaaggtgtgagttcttgatacgaatgaaaggccaagagtttgttgatgagattcaaggtagatatcctcatcttcttgaacagctgttgtcaacttcagataccactggagaagaaaatgctgacccaccaattattcattttggacctggagaaagttcttcagaagatgctgtcatgatgaatacacctgtggttaaatctgccttggaaatgggctttaatagagacctggtgaaacaaacagttcaaagtaaaatcctgacaactggagagaactataaaacagttaatgatattgtgtcagcacttcttaatgctgaagatgaaaaaagagaagaggagaaggaaaaacaagctgaagaaatggcatcagatgatttgtcattaattcggaagaacagaatggctctctttcaacaattgacatgtgtgcttcctatcctggataatcttttaaaggccaatgtaattaataaacaggaacatgatattattaaacaaaaaacacagatacctttacaagcgagagaactgattgataccattttggttaaaggaaatgctgcggccaacatcttcaaaaactgtctaaaagaaattgactctacattgtataagaacttatttgtggataagaatatgaagtatattccaacagaagatgtttcaggtctgtcactggaagaacaattgaggaggttgcaagaagaacgaacttgtaaagtgtgtatggacaaagaagtttctgttgtatttattccttgtggtcatctggtagtatgccaggaatgtgccccttctctaagaaaatgccctatttgcaggggtataatcaagggtactgttcgtacatttctctcttaa

SEQ ID NO: 554 - DNA, 603 bp, human
atggaaaaaccctacaataaaaatgaaggaaacctggaaaacgagggaaagccagaagatgaagtagagcctgatgatgaaggaaagtcagacgaggaagaaaagccagacgtggaggggaagacagaatgcgagggaaagagagaggatgagggagagccaggtgatgagggacaactggaagatgagggaagccaggaaaagcagggcaggtccgaaggtgagggcaagccacaaggcgagggcaagccagcctcccaggcaaagccagagagccagccgcgggccgccgaaaagcgcccggctgaagattatgtgccccggaaagcaaaaagaaaaacggacagggggacggacgattcccccaaggactctcaggaggacttacaggaaaggcatctgagcagtgaggagatgatgagagaatgtggagatgtgtcaagggctcaagaggagctaaggaaaaaacagaaaatgggtggttttcattggatgcaaagagatgtacaggatccattcgccccaaggggacaacggggtgtcaggggagtgaggggtggaggtaggggccagaggggcttacacgatatcccatacctttaa

SEQ ID NO: 555 - DNA, 1026 bp, human
atggagagggcaggaccagccggggaggagggcggcgcgcgcgagggtcgccttcttcccagggcaccgggggcgtgggtgctgcgggcgtgcgccgagagggcagccttggaagtgggcgcagcttcggcagacacaggcgtgaggggctgcggagctcgagggccggcgcccctgcttgcctctgcgggaggtgggcgcgcccgggacggaacctggggcgtcagaacgaaaggcagcggcgccgcgcttcccagccggccagcctcccgcgcagcgccccggccggaagcctcctcgccgccgcttcctctcgagaaggcgcggggcgggctgtccggcccgcagggcggtcgagcccgcggcgccatggctcacgtcggctcccgcaagcgctcgaggagtcgcagccggtcccggggacgggggtcggaaaagagaaagaagaagagcaggaaagacacctcgaggaactgctcggcctccacatcccaagagagaagcaagcagaaggcccggaggagaacaagatccagctcctcctcctcttcttccagttcttctagctcctcttcttcctcctcgtcctcctcctcttcctccagtgatggccggaagaagcgggggaagtacaaggacaagaggaggaagaagaagaagaagaggaagaagctgaagaagaagggcaaggagaaggcggaagcacagcaggtggaggctctgccgggcccctcgctggaccagtggcaccgatcagctggggaggaagaggatggcccagtcctgacggatgagcagaagtcccgaatccaggccatgaagcccatgaccaaggaggagtgggatgcccggcagagcatcatccgcaaggtggtggaccctgagacggggcgcaccaggcttattaagggagatggcgaggtcctagaggaaatcgtaaccaaagaacgacacagagagatcaacaagcaagccacccgaggggactgcctggccttccagatgcgagctgggttgcttccctga

SEQ ID NO: 556 - DNA, 1560 bp, human
atgacctccaccttcaacccccgagaatgtaaactgtccaagcaagaagggcaaaactatggcttcttcctgcgaattgagaaggacaccgagggccacctggtccgggtggttgagaagtgtagcccagcagagaaggctggccttcaagatggagacagagttcttaggatcaatggtgtctttgtggacaaagaagaacatatgcaggttgtggatctggtcagaaagagtgggaattcagtgactttactagttctggatggggattcctatgagaaagcagtgaaaacacgggtggacttgaaagagttgggtcaaagtcagaaggagcaaggtttgagtgataatatactttcccctgtgatgaatggaggtgtgcaaacttggacccagccccggctctgctatctcgtgaaggaaggaggcagctatggcttctctctgaaaactgtccaaggtaaaaagggggtgtacatgactgatattacacctcaaggtgtggctatgagagctggagttctggctgatgatcacttgattgaagtgaatggagagaatgtagaggatgccagccatgaggaagtggttgaaaaggtgaagaagtcaggaagccgtgtcatgttcctgctggtggacaaagaaactgacaagcgtcatgttgagcagaagatacaattcaaaagagaaacagccagtttgaaactgttaccccaccagccccgaattgtggagatgaagaaaggaagcaatggctatggtttctatctgagggcaggctcagaacagaaaggtcaaatcatcaaggacatagattctggaagtccagcagaggaggctggcttgaagaacaatgatctggtagttgctgtcaacggcgagtctgtggaaaccctggatcatgacagtgtggtagaaatgattagaaagggtggagatcagacttcactgttggtggtagacaaagagacggacaacatgtacagactggctcatttttctccatttctctactatcaaagtcaagaactgcccaatggctctgtcaaggaggctccagctcctactcccacttctctggaagtctcaagtccaccagatactacagaggaagtagatcataagcctaaactctgcaggctggctaaaggtgaaaatggctatggctttcacttaaatgcgattcggggtctgccaggctcattcatcaaagaggtacagaagggcggtcctgctgacttggctgggctagaggatgaggatgtcatcattgaagtgaatggggtgaatgtgctagatgaaccctatgagaaggtggtggatagaatccagagcagtgggaagaatgtcacacttctagtctgtggaaagaaggcctatgattatttccaagctaagaaaatccctattgtttcctccctggctgatccacttgacacccctccagattctaaagaaggaatagtggtggagtcaaaccatgactcgcacatggcaaaagaacgggcccacagtacagcctcacattcttcttccaattctgaagatacagagatgtga

SEQ ID NO: 557 - DNA, 597 bp, human
atggcccagaagccgaaggtggacccccacgtcgggcggctgggatacctgcaggcgctggtcacggaattccaggagacccaaagccaagacgccaaggagcaagtcctcgccaacctcgccaacttcgcttatgaccccagcaactacgagtatctgcggcagctgcaggtcctggatttatttctcgattcgctgtcggaggagaatgagaccctggtggagtttgctattggaggcctgtgcaacctgtgcccagacagggccaacaaggagcacatcctgcacgcaggaggtgtcccactcatcatcaactgcctatccagccccaatgaggagacggtgctgtctgccatcaccacgctcatgcacctgagcccgccgggccgcagctttctcccagagctgaccgccacgcccgtggtgcagtgcatgcttcgcttctccctctcggccagcgccaggctccggaacctggcacagatcttcctggaggacttctgctccccccgccaggtggccgaggcccgcagccggcaggcgcactctgccctgggtatcccactgccgaggagcgtggccccacggcagcgctga

SEQ ID NO: 558 - DNA, 1413 bp, human
atggggaaacttcactccaagccggccgccgtgtgcaagcgcagggagagcccggaaggtgacagcttcgccgtgagcgctgcctgggctcggaagggcatcgaggagtggatcgggagacagcgctgcccgggcggtgtctcgggaccccgacagctgcggttggcgggcaccataggccgaagcacccgggagctcgtgggcgacgtgttgagagacacgctcagcgaggaagaggaggacgactttcggctggaagtggccctgcctcctgagaagactgacgggctgggcagcggagatgagaagaagatggagagagtgagcgaaccctgcccaggctccaagaagcagctgaagtttgaagagctccagtgcgacgtgtccatggaggaggacagccggcaggagtggaccttcaccctgtatgactttgacaacaacggcaaggtcacccgagaggacatcaccagcttgctgcacaccatctatgaggtggtggactcctctgtcaaccactccccaacatccagcaagatgctgcgggtaaagctcaccgtggcccccgatggcagccagagcaagaggagcgtccttgtcaatcaggctgacctgcagagcgcaaggccccgagcagagaccaagcccactgaggacctgcggagctgggagaagaagcagcgagccccgctcaggttccagggtgacagccgcctggagcagtctggctgctaccaccattgcgtagatgagaacatcgagaggagaaaccactacttagatctcgccgggatagaaaactacacgtcccaatttgggcctggctccccttccgtggcccagaagtcagaactgcccccccgcacctccaatcccactcgatctcgctcccatgagccggaagccatccacatcccacaccgaaagccccaaggcgtggacccggcctccttccacttccttgacaccccaatcgccaaggtctcagagctccagcaacggctccggggcacccaggacgggagcaagcactttgtgaggtcccccaaggcccagggcaagagtgtgggtgtgggccacgtggccagaggggcaagaaacaagccccctctgggacccgccatccctgcggtgtccccctccgcccacctggctgccagcccggccctcctcccctccctagcccccctcgggcacaagaagcacaagcaccgagccaaggagagccagcagggctgccggggcctgcaggcaccactggcctcaggtggccctgtcctggggcgggagcacctgcgggagctgcccgccttggtggtgtatgagagccaggccgggcagccggtccagagacatgagcaccaccaccaccatgaacatcaccaccattaccaccacttctaccagacatag

SEQ ID NO: 559 - DNA, 2001 bp, human
atgggtgagtcaagtgaagacatagaccaaatgttcagcactttgctgggagagatggatcttctgactcagagtttaggagttgacactctccctcctcctgaccctaatccacccagagctgaatttaactacagtgtggggtttaaagatttaaatgagtccttaaatgcactggaagaccaagatttagatgctctcatggcagatctggtagcagacataagtgaggctgagcagaggacaatccaggcacagaaagagtccttgcagaatcaacatcattcagcatctctacaagcatcaattttcagtggtgcagcctctcttggttatggaacaaatgttgctgccactggtatcagccaatatgaggatgacttaccacctccaccagccgatcctgtgttagaccttccactgccaccaccacctcctgaacctctctctcaggaagaggaagaagcccaagccaaggctgataaaattaagctggcgctggaaaaactgaaggaggccaaggttaagaagctcgtcgtcaaggtgcacatgaatgataacagcacaaagtcactgatggtggatgagcggcagctggcccgagatgttctggacaaccttttcgagaaaactcattgtgactgcaatgtagactggtgtctttatgaaatctacccggaactacaaattgagaggttttttgaagaccatgaaaatgttgttgaagtcttatcagactggacaagagacacagaaaataaaatactatttttggagaaagaggagaaatatgctgtatttaaaaacccccagaatttctacttggataacagaggaaaaaaagaaagcaaggaaactaatgagaaaatgaatgctaagaacaaggaatccttacttgaggaaagtttctgtggaacatctatcattgtaccagaactggaaggagctctttatttgaaagaagatggaaagaaatcctggaaaaggcgctattttcttttacgggcttctggaatttattatgtacccaaaggaaagactaagacatctcgagatctggcgtgttttatacagtttgaaaatgtcaacatttactatgggactcagcataaaatgaaatataaagcgcccactgactattgctttgttttaaagcacccccaaattcagaaggagtcccagtatatcaagtatctctgctgtgatgacacaagaacccttaaccagtgggtcatgggaatacggatagccaagtatgggaagactctctatgataactaccagcgggctgtggcaaaggctggacttgcctctcggtggacaaacttggggacagtcaatgcagctgcaccagctcagccatctacaggacctaaaacaggcaccacccagcccaatggacagattccccaggctacacattctgtcagtgctgttctccaagaggcccagagacatgctgaaacatcgaaggataagaagccagccctcgggaaccaccacgacccggcagtgccccgggccccgcacgcccccaagtccagcctgcccccgccccctccggtgcggaggtcctccgacaccagcggcagtcccgccacgcccctcaaggccaagggcacaggcggcgggggcttgcccgccccacccgacgacttcctgccgccgccgccaccgccgccgcccctcgatgaccctgagctcccgccgccgcccccggacttcatggagccgcccccagacttcgtgcccccgcccccgccgtcgtacgcagggatcgcgggctcagagctgcccccgccgccgccgccgccgcccgcgcccgcgcccgcccccgtccccgactccgccaggccgccccccgcggtggccaagaggcctcctgtgccccccaagaggcaagagaacccagggcaccccggcggagcaggaggcggggagcaagatttcatgtcagacctcatgaaagctttgcaaaagaagagaggcaacgtgtcctag

SEQ ID NO: 560 - DNA, 1215 bp, human
atggcagccggaacagcagttggagcctgggtgctggtcctcagtctgtggggggcagtagtaggtgctcaaaacatcacagcccggattggcgagccactggtgctgaagtgtaagggggcccccaagaaaccaccccagcggctggaatggaaactgaacacaggccggacagaagcttggaaggtcctgtctccccagggaggaggcccctgggacagtgtggctcgtgtccttcccaacggctccctcttccttccggctgtcgggatccaggatgaggggattttccggtgccaggcaatgaacaggaatggaaaggagaccaagtccaactaccgagtccgtgtctaccagattcctgggaagccagaaattgtagattctgcctctgaactcacggctggtgttcccaataaggtggggacatgtgtgtcagagggaagctaccctgcagggactcttagctggcacttggatgggaagcccctggtgcctaatgagaagggagtatctgtgaaggaacagaccaggagacaccctgagacagggctcttcacactgcagtcggagctaatggtgaccccagcccggggaggagatccccgtcccaccttctcctgtagcttcagcccaggccttccccgacaccgggccttgcgcacagcccccatccagccccgtgtctgggagcctgtgcctctggaggaggtccaattggtggtggagccagaaggtggagcagtagctcctggtggaaccgtaaccctgacctgtgaagtccctgcccagccctctcctcaaatccactggatgaaggatggtgtgcccttgccccttccccccagccctgtgctgatcctccctgagatagggcctcaggaccagggaacctacagctgtgtggccacccattccagccacgggccccaggaaagccgtgctgtcagcatcagcatcatcgaaccaggcgaggaggggccaactgcaggctctgtgggaggatcagggctgggaactctagccctggccctggggatcctgggaggcctggggacagccgccctgctcattggggtcatcttgtggcaaaggcggcaacgccgaggagaggagaggaaggccccagaaaaccaggaggaagaggaggagcgtgcagaactgaatcagtcggaggaacctgaggcaggcgagagtagtactggagggccttga

SEQ ID NO: 561 - DNA, 1929 bp, human
atggactcagtctcctttgaggatgtggccgtgaacttcaccctggaggagtgggctttgctggattcttcacagaaaaagctctatgaagatgtgatgcaggagaccttcaaaaacctggtttgtctaggaaaaaagtgggaagaccaggacattgaagatgaccacagaaaccaggggaaaaatcgaagatgtcatatggttgagagactctgtgaaagtagaagaggtagcaaatgtggagaaaccactagccagatgccaaatgttaatatcaacaaggaaacttttactggagcaaaaccacatgaatgcagcttttgtggaagagacttcattcatcattcgtcccttaataggcacatgagatctcacactggacagaaaccaaatgagtatcaggaatatgaaaagcaaccatgtaaatgtaaagcagttgggaaaaccttcagttatcaccactgctttcgcaaacatgaaagaactcacactggagtgaagccctatgaatgtaaacagtgtgggaaagcctttatatattaccagccatttcaaagacatgaaaggactcatgctggacagaaaccctatgaatgtaagcaatgtggaaaaacctttatatattaccagtcttttcaaaaacatgctcatactggaaagaaaccctatgaatgtaaacagtgtgggaaagcctttatatgttaccaatcttttcaaagacacaaaaggactcacactggagagaaaccctatgaatgtaagcaatgtggtaaggctttcagttgtcccacatactttcgaactcatgaaagaactcacactggagaaaaaccctacaaatgtaaagaatgtggtaaagccttcagttttctcagttcttttcgaaggcataaaaggactcatagtggagagaaaccctatgaatgtaaagaatgtggaaaagccttcttttattctgcaagctttcgagcacatgtaataatacacactggggctcgaccttataaatgtaaagaatgtgggaaagccttcaactcttctaattcctgtcgagtgcatgaaagaactcatattggagaaaaaccatatgaatgtaaacgatgtggcaaatcattcagttggtccatttctcttcgattgcatgaaagaactcatactggagagaaaccttatgagtgtaaacagtgtcataaaaccttcagtttttcaagttcccttcgagaacacgaaacaactcacactggagagaaaccctatgaatgtaaacaatgtggtaaaaccttcagtttttcaagttcccttcaaagacatgaaaggactcacaatgcagagaaaccctatgaatgtaaacagtgtgggaaagccttcaggtgttcaagttattttcgaattcatgaaaggtcacacactggagagaaaccctatgaatgtaaacagtgtggaaaagttttcattcgttccagttcctttcgactgcatgaaagaacacacactggagagaaaccctatgaatgtaaactatgcggtaaaaccttcagtttttcaagttcccttcgagaacatgaaaaaattcacactggaaataagccttttgagtgtaagcaatgtggtaaggccttccttcgttccagtcaaattcgattgcatgaaaggactcacactggagagaaaccgtatcaatgtaaacaatgtggaaaagccttcatttcttccagtaaatttcgaatgcatgagagaactcacacgggagagaaaccctatcgatgtaaacaatgtgggaaagccttcagattttcaagttctgttcgaattcatgaaaggtctcacactggagagaaaccttatgaatgcaaacaatgtggaaaagccttcatttcttccagtcactttcgactgcatgaaaggactcatatgggagagaaagtctaa

SEQ ID NO: 562 - DNA, 1521 bp, human
atggcttctggggacctttacgaggttgaaaggattgtagacaagaggaagaacaagaaaggaaaatgggagtatcttatccgatggaaaggctacgggagcaccgaggacacgtgggagccggagcaccacctcttgcactgtgaggagtttattgatgaattcaatgggttgcacatgtccaaggacaagaggatcaagtcagggaagcagtccagtacctccaagctgctgcgtgacagtcgaggcccgtcggttgagaaactgtcccacagaccttcagatcctggaaagagcaaggggacctcccataaacggaagcgaattaaccctcccctggccaagccaaaaaaagggtattcaggcaagccctcttcaggaggtgacagggccaccaagacggtgtcttacaggactacccccagtggtttgcaaataatgcccctgaaaaagtctcagaacgggatggaaaatggggacgccggctctgagaaggatgagaggcactttggaaatgggtcccatcagcctggcttggatttgaatgatcatgttggagagcaagatatgggtgaatgtgacgtgaatcacgctacactggcggagaacgggctcggctctgctctgaccaacgggggattgaacctgcacagtccagtgaagaggaagctggaagcggagaaggactacgtctttgacaaaaggctcagatacagtgtccgccagaatgaaagcaactgtcggtttcgagacatcgttgtgcggaaggaagaagggttcacgcacatcctgctgtccagtcagacctcggataacaatgccctgacacctgagatcatgaaagaagtccggcgagcgctctgcaacgcagccacagacgacagcaaactgctgctcctcagcgcagtggggagcgtgttctgcagcggcctggattattcctacctaattggccggttgtccagcgaccggcgaaaggagagcactcggattgcagaagccatcagggactttgtgaaggcctttatccagtttaagaagcctatcgtggtggccatcaatgggccggccctgggcctgggtgcctccatcctgcccctctgtgacatcgtgtgggccagtgagaaggcctggttccagacgccctacgccaccatccgcctcacgcctgctggctgctcctcctacaccttcccccagatcctgggcgtcgcgctggccaatgagatgctgttctgtgggcggaagctcaccgcccaggaggcctgcagcagggggctggtgtcgcaggtcttctggcccaccacgttcagccaggaggtcatgctgcgggtcaaggagatggcatcctgcagtgccgtggtgttagaggagtccaaatgcctcgtgcggagcttcctgaaatcagtgctggaagacgtgaacgagaaggaatgcctcatgctcaagcagctctggagctcctccaaaggccttgactcccttttcagctacctgcaggacaaaatttatgaagtctga

SEQ ID NO: 563 - DNA, 1347 bp, human
tcaagggttcaagatgatgaagttggtgatggcactacctctgttaccgttttagcagcagaattattaagggaagcagaatctttaattgcaaaaaagattcatccacagaccatcatagcgggttggagagaagccacgaaggctgcaagagaggcgctgttgagttctgcagttgatcatggttccgatgaagttaaattccgtcaagatttaatgaatattgcgggcacaacattatcctcaaaacttcttactcatcacaaagaccactttacaaagttagctgtagaagcagttctcagactgaaaggctctggcaacctggaggcaattcatattatcaagaagctaggaggaagtttggcagattcctatttagatgaaggcttcctgttggataaaaaaattggagtaaatcaaccaaaacgaattgaaaatgctaaaattcttattgcaaatactggtatggatacagacaaaataaagatatttggttcccgggtaagagttgactctacagcaaaggttgcagaaatagaacatgcggaaaaggaaaaaatgaaggagaaagttgaacgtattcttaagcatggaataaattgctttattaacaggcaattaatttataattatcctgaacagctctttggtgctgctggtgtcatggctattgagcatgcagattttgcaggtgtggaacgcctagctcttgtcacaggtggtgaaattgcctctacctttgatcacccagaactggtgaagcttggaagttgcaaacttatcgaggaagtcatgattggagaagacaaactcattcacttttctggggttgcccttggtgaggcttgtaccattgttttgcgtggtgccactcaacaaattttagatgaagcagaaagatcattgcatgatgctctttgtgttcttgcgcaaactgtaaaggactctagaacagtttatggaggaggctgttctgagatgttgatggctcatgctgtgacacagcttgccaatagaacaccaggcaaagaagctgttgcaatggagtcttatgctaaagcactgagaatgttgccaaccatcatagctgacaatgcaggctatgacagtgcagacctggtggcacagctcagggctgctcacagtgaaggcaataccactgctggattggatatgagggaaggcaccattggagatatggctatcctgggtataacagaaagttttcaagtgaagcgacaggttcttctgagtgcagctgaagcagcagaggtgattctgcgtgtggacaacatcatcaaagcggcacccaggaaacgtgtccctgatcaccacccctgttaa

SEQ ID NO: 564 - DNA, 816 bp, human
atggctggcccgcagcagcagcccccttacctgcacctggccgagctgacggcgtcccagttcctggaaatatggaagcactttgacgcagacggaaatgggtatattgaaggtaaagagctagaaaactttttccaagagctggagaaggcaaggaaaggctctggcatgatgtcaaagagtgacaactttggagaaaagatgaaggagttcatgcagaagtatgataaaaactcagatgggaaaatcgagatggcagagctggcgcagatcctgccaaccgaagagaacttccttctgtgcttcaggcagcacgtgggctccagcgccgagtttatggaggcttggcggaagtacgacacagacaggagtggctacatcgaagccaatgagctcaagggattcctgtcagacctgctgaagaaggcgaaccggccgtacgatgagcccaagctccaggaatacacccaaaccatactacggatgtttgacttgaacggggatggcaaattgggcctctcagagatgtcccgactcctgcctgtccaggaaaacttcctgcttaaatttcagggcatgaagctgacctcagaggagtttaacgcgatcttcacattttacgacaaggatagaagcggctacattgacgagcatgagctggatgcccttttgaaggatctgtacgagaaaaacaaaaaggaaatgaatattcaacagctcaccaactacagaaagagcgtcatgtccttggcagaggcagggaagctctaccgcaaggacctggagattgtgctctgcagcgagccccccatgtaa

SEQ ID NO: 565 - DNA, 2229 bp, human
atgccctgctgtagtcacaggagctgtagagaggaccccggtacatctgaaagccgggaaatggacccagtggcctttgaggatgtggctgtgaacttcacccaggaagagtggacattgctggatatttcccagaagaatctcttcagggaagtgatgctggaaactttcaggaacctgacctctataggaaaaaaatggagtgaccagaacattgaatatgagtaccaaaaccccagaagaagcttcaggagtctcatagaagagaaagtcaatgaaattaaagaagacagtcattgtggagaaacttttacccaggttccagatgacagactgaacttccaggagaagaaagcttctcctgaagtaaaatcatgtgacagctttgtgtgtgcagaagttggcataggtaactcatcttttaatatgagcatcagaggtgacactggacacaaggcatatgagtatcaggaatatggaccaaagccatataagtgtcaacaacctaaaaataagaaagccttcaggtatcgcccatccattagaacacaagaaagggatcacactggagagaaaccctatgcttgtaaagtctgtggaaaaacctttattttccattcaagcattcgaagacacatggtaatgcacagtggggatggaacttataaatgtaaattttgtgggaaagccttccattctttcagtttatatcttatccatgaaagaactcacactggagagaaaccatatgaatgtaaacaatgtggtaaatcctttacttattctgctacccttcaaatacatgaaagaactcacactggggagaagccctatgaatgtagcaaatgtgataaagcatttcatagttctagttcctatcatagacatgaaagaagtcacatgggagagaagccttatcaatgcaaagaatgtggaaaagcatttgcatataccagttctcttcgtagacatgaaaggacccactctgggaaaaaaccgtatgaatgtaagcaatatggggaaggcttatcctatcttataagttttcaaacacacataagaatgaactctggagaaagaccttataaatgtaagatatgtgggaaaggcttttattctgccaagtcatttcaaacacatgaaaaaactcacactggagagaaacgctataaatgcaagcaatgtggtaaagccttcaatctttccagttcctttcgatatcatgaaaggattcacactggagagaaaccctatgagtgtaagcagtgtgggaaagccttcagatctgcctcacagcttcgagtgcacggtgggactcacactggagagaaaccctatgaatgtaaggaatgtgggaaagccttcagatctacctcacaccttcgagtgcatggtaggactcatactggagagaaaccctatgaatgtaaggaatgtgggaaagccttcagatatgtgaagcaccttcaaattcatgaaaggacagaaaaacacataagaatgccctctggagaaagaccttataaatgtagtatatgtgagaaaggcttttattctgccaagtcatttcaaacacatgaaaaaactcacactggagagaaaccctatgaatgcaaccaatgtggtaaagccttcagatgttgcaattcccttcgatatcatgaaaggactcacactggagagaaaccctatgagtgtaagcaatgtgggaaagccttcagatctgcctcacaccttcgaatgcatgaaaggactcacactggagagaaaccctatgagtgtaagcaatgtgggaaagccttcagttgtgcctcaaaccttcgaaagcatggtaggactcacactggagagaaaccctatgagtgtaagcaatgtgggaaagccttcagatctgcctcaaaccttcagatgcatgaaaggactcacactggagagaaaccctatgaatgtaaggaatgcgaaaaagcattctgtaaattctcttcttttcaaatacatgaaaggaagcacagaggagagaagccctatgaatgtaagcattgtgggaatggattcacatctgccaagattcttcaaatacatgcaagaacacacattggagagaaacactatgaatgtaaggaatgcggaaaagcattcaattatttttcttccttgcatatacacgcaaggactcatatgggagagaagccatatgaatgtaaggattgtgggaaagcattcagctag

SEQ ID NO: 566 - DNA, 1872 bp, human
atggcccataaatatgtgggtttgcagtatcacggatcagtgacatttgaggatgtggccatagccttctcccagcaggagtgggagagtctggactcttcccagaggggcttgtacagagatgtgatgttggagaactacaggaacttggtgtcaatgggacattcccgttctaaaccacatgtgatcgccttattggaacaatggaaagagcctgaagtgacagtgaggaaagatggaagaagatggtgcacagatttgcagttggaagatgatacaatcggctgtaaagaaatgcccacctctgaaaactgtccatcttttgctctacatcagaaaataagtagacagaaaccacgtgaatgtcaggaatatggaaagaccctttgtcaagactcaaagcctgttcaacatgaaagaatacatagtagtgaaaaacccaacagatgtaaagaatgtgggaagaactttagtaatggacatcaactcaccatacatcagagattgcatgttggtgagaaaccctataaatatgaaaaatgtgggaaggcctttatcagtggctcagcctttgttaagcatgggagaattcacactggtgagaagccactcaaatgtaagcaatgtggaaagactattagtggtagctatcaacttacagtacataagagtattcatactgggaagaaaccatatgagtgcggggaatgtgggaaagcttttctagtatatggaaagcttacccggcatcagagtactcacactggtgaaaaaccctttgggtgtgaggagtgtgggaaggccttcagtaccttttcatacctggttcaacatcagcgaattcataccagtgaaaaaccttacgaatgcaaagaatgtgggaaggcctttagcactagctcaccccttgctaagcatcagagaattcatactggcgagaaaccctatgaatgtaaggagtgtgggaagtccttcactgtgtatggacagcttactcgacatcagagtattcatactggtgagaaaccttttgaatgtaaggaatgtggaaaggcctttagacttagttccttccttcatgcacatcagcgaattcatgcagagataaagccctacggatgcaaggaatgcgggagaaccttcagtcgtgcctcatatcttgttcaacatggaagacttcacactggcgagaagccctatgaatgtaaggagtgtggcaaggcctttagtactggctcataccttgttcagcatcagaggatccatactggggagaaaccctatgaatgtaaggaatgtggcaaagcctttattagtcgccatcagcttaccgtacatcaaagggttcatactggagagaaaccctatgagtgtaaggaatgtggcaaggccttcagagtgcacgtacatctcacacagcatcggaaaattcatactgatgtaaagccctatgaatgtaaggaatgtggaaagacttttagtcgagcctcgtaccttgtacaacatagcagaatccatactggtaagaagccctatgagtgtaaggagtgtggcaaggccttcagttctggctcataccttgttcagcatcaaagaattcatactggggagaaaccctatgaatgtaacaaatgtgggaaagcctttactgtttatggacaacttattggacatcagagtgttcacactggtgagaaaccttttgaatgtaaggaatgcgggaaggcctttagacttaattcattccttactgaacatcagcgggtacacactggtgagaaaccctttaaatgcaaaaaatgtgggaagacctttagatacagttcagcccttaaagtgcatctgagaaaacatatgagtgttataccctaa

SEQ ID NO: 567 - DNA, 1575 bp, human
attgtgaacaagaacactcctcgagtaaatccatgtgacagtggtgagtgtggagaagtcgtcttgggtcattcgtctcttaattgcaacatcagagttgacactggacacaaatcatgtgagcatcaggaatatggagagaagccatatacacataaacaacgtgggaaagccatcagtcatcagcactccttccagacacatgaaaggccccccaccggaaagaaacccttcgattgtaaagaatgtgcaaaaacctttagttctcttggaaacctccgaagacacatggcggcacaccatggagatggaccttataaatgtaagttgtgtgggaaagcctttgtttggcccagtttatttcatttgcacgaaagaacacacactggagagaaaccgtatgaatgtaagcagtgttctaaagcctttcctttttacagttcctatctaagacatgaaagaatccacacgggagagaaagcgtatgaatgtaagcagtgttccaaagcctttcctgattacagtacctatctaagacatgagagaactcacaccggagagaaaccctataaatgtacacaatgtgggaaagccttcagctgttactattacactcgactacatgaaaggactcacacgggagaacaaccctatgcatgtaagcaatgtgggaaaacgttttatcatcacacaagctttcgaagacacatgataaggcacactggagacggaccacataaatgtaagatatgtgggaaaggctttgattgtcctagttcagttcgaaatcatgaaactactcacactggagagaaaccctatgaatgtaagcagtgtgggaaagtgttatctcatagctcgagctttcgaagtcacatgataacacacacaggagatggaccccagaaatgcaagatatgtgggaaagcctttggttgtcccagtttatttcaaagacatgaaaggactcacactggagagaaaccctatcaatgtaaacaatgtggtaaagccttcagtcttgccggttcccttcgaagacatgaagcaactcacactggagtgaaaccctataaatgtcagtgtgggaaagcctttagtgatctctcttcctttcaaaatcatgagacaactcacactggagagaagccatatgagtgtaaggaatgtgggaaagcattcagttgtttcaaatacctttctcaacataaaaggacccacacagtagaaaaaccttatgagtgtaaaacatgtagaaaagccttcagtcatttcagtaacttaaaagtccatgaaaggattcactctggagagaagccatatgaatgtaaggaatgtggaaaagcattctcttggctcacttgccttctacgacatgaaagaattcacactggagagaaaccctatgaatgtctacaatgtggtaaagccttcactcgttcccgtttccttcgaggacatgaaaaaactcacactggagagaagctgtatgaatgtaaggaatgtgggaaagcattgagttctctccgttccttgcatagacataaaaggactcactggaaagatactctctaa

SEQ ID NO: 568 - DNA, 7440 bp, human
atgccacctaatataaactggaaagaaataatgaaagttgacccagatgacctgccccgtcaagaagaactggcagataatttattgatttccttatccaaggtggaagtaaatgagctaaaaagtgaaaagcaagaaaatgtgatacaccttttcagaattactcagtcactaatgaagatgaaagctcaagaagtggagctggctttggaagaagtagaaaaagctggagaagaacaagcaaaatttgaaaatcaattaaaaactaaagtaatgaaactggaaaatgaactggagatggctcagcagtctgcaggtggacgagatactcggtttttacgtaatgaaatttgccaacttgaaaaacaattagaacaaaaagatagagaattggaggacatggaaaaggagttggagaaagagaagaaagttaatgagcaattggctcttcgaaatgaggaggcagaaaatgaaaacagcaaattaagaagagagaacaaacgtctaaagaaaaagaatgaacaactttgtcaggatattattgactaccagaaacaaatagattcacagaaagaaacacttttatcaagaagaggggaagacagtgactaccgatcacagttgtctaaaaaaaactatgagcttatccaatatcttgatgaaattcagactttaacagaagctaatgagaaaattgaagttcagaatcaagaaatgagaaaaaatttagaagagtctgtacaggaaatggagaagatgactgatgaatataatagaatgaaagctattgtgcatcagacagataatgtaatagatcagttaaaaaaagaaaacgatcattatcaacttcaagtgcaggagcttacagatcttctgaaatcaaaaaatgaagaagatgatccaattatggtagctgtcaatgcaaaagtagaagaatggaagctaattttgtcttctaaagatgatgaaattattgagtatcagcaaatgttacataacctaagggagaaacttaagaatgctcagcttgatgctgataaaagtaatgttatggctctacagcagggtatacaggaacgagacagtcaaattaagatgctcaccgaacaagtagaacaatatacaaaagaaatggaaaagaatacttgtattattgaagatttgaaaaatgagctccaaagaaacaaaggtgcttcaaccctttctcaacagactcatatgaaaattcagtcaacgttagacattttaaaagagaaaactaaagaggctgagagaacagctgaactggctgaggctgatgctagggaaaaggataaagaattagttgaggctctgaagaggttaaaagattatgaatcgggagtatatggtttagaagatgctgtcgttgaaataaagaattgtaaaaaccaaattaaaataagagatcgagagattgaaatattaacaaaggaaatcaataaacttgaattgaagatcagtgatttccttgatgaaaatgaggcacttagagagcgtgtgggccttgaaccaaagacaatgattgatttaactgaatttagaaatagcaaacacttaaaacagcagcagtacagagctgaaaaccagattcttttgaaagagattgaaagtctagaggaagaacgacttgatctgaaaaaaaaaattcgtcaaatggctcaagaaagaggaaaaagaagtgcaacttcaggattaaccactgaggacctgaacctaactgaaaacatttctcaaggagatagaataagtgaaagaaaattggatttattgagcctcaaaaatatgagtgaagcacaatcaaagaatgaatttctttcaagagaactaattgaaaaagaaagagatttagaaaggagtaggacagtgatagccaaatttcagaataaattaaaagaattagttgaagaaaataagcaacttgaagaaggtatgaaagaaatattgcaagcaattaaggaaatgcagaaagatcctgatgttaaaggaggagaaacatctctaattatccctagccttgaaagactagttaatgctatagaatcaaagaatgcagaaggaatctttgatgcgagtctgcatttgaaagcccaagttgatcagcttaccggaagaaatgaagaattaagacaggagctcagggaatctcggaaagaggctataaattattcacagcagttggcaaaagctaatttaaagatagaccatcttgaaaaagaaactagtcttttacgacaatcagaaggatcgaatgttgtttttaaaggaattgacttacctgatgggatagcaccatctagtgccagtatcattaattctcagaatgaatatttaatacatttgttacaggaactagaaaataaagaaaaaaagttaaagaatttagaagattctcttgaagattacaacagaaaatttgctgtaattcgtcatcaacaaagtttgttgtataaagaatacctaagtgaaaaggagacctggaaaacagaatctaaaacaataaaagaggaaaagagaaaacttgaggatcaagtccaacaagatgctataaaagtaaaagaatataataatttgctcaatgctcttcagatggattcggatgaaatgaaaaaaatacttgcagaaaatagtaggaaaattactgttttgcaagtgaatgaaaaatcacttataaggcaatatacaaccttagtagaattggagcgacaacttagaaaagaaaatgagaagcaaaagaatgaattgttgtcaatggaggctgaagtttgtgaaaaaattgggtgtttgcaaagatttaaggaaatggccattttcaagattgcagctctccaaaaagttgtagataatagtgtttctttgtctgaactagaactggctaataaacagtacaatgaactgactgctaagtacagggacatcttgcaaaaagataatatgcttgttcaaagaacaagtaacttggaacacctggagtgtgaaaacatctccttaaaagaacaagtggagtctataaataaagaactggagattaccaaggaaaaacttcacactattgaacaagcctgggaacaggaaactaaattaggtaatgaatctagcatggataaggcaaagaaatcaataaccaacagtgacattgtttccatttcaaaaaaaataactatgctggaaatgaaggaattaaatgaaaggcagcgggctgaacattgtcaaaaaatgtatgaacacttacggacttcgttaaagcaaatggaggaacgtaattttgaattggaaaccaaatttgctgagcttaccaaaatcaatttggatgcacagaaggtggaacagatgttaagagatgaattagctgatagtgtgagcaaggcagtaagtgatgctgataggcaacggattctagaattagagaagaatgaaatggaactaaaagttgaagtgtcaaaactgagagagatttctgatattgccagaagacaagttgaaattttgaatgcacaacaacaatctagggacaaggaagtagagtccctcagaatgcaactgctagactatcaggcacagtctgatgaaaagtcgctcattgccaagttgcaccaacataatgtctctcttcaactgagtgaggctactgctcttggtaagttggagtcaattacatctaaactgcagaagatggaggcctacaacttgcgcttagagcagaaacttgatgaaaaagaacaggctctctattatgctcgtttggagggaagaaacagagcaaaacatctgcgccaaacaattcagtctctacgacgacagtttagtggagctttacccttggcacaacaggaaaagttctccaaaacaatgattcaactacaaaatgacaaacttaagataatgcaagaaatgaaaaattctcaacaagaacatagaaatatggagaacaaaacattggagatggaattaaaattaaagggcctggaagagttaataagcactttaaaggataccaaaggagcccaaaaggtaatcaactggcatatgaaaatagaagaacttcgtcttcaagaacttaaactaaatcgggaattagtcaaggataaagaagaaataaaatatttgaataacataatttctgaatatgaacgtacaatcagcagtcttgaagaagaaattgtgcaacagaacaagtttcatgaagaaagacaaatggcctgggatcaaagagaagttgacctggaacgccaactagacatttttgaccgtcagcaaaatgaaatactaaatgcggcacaaaagtttgaagaagctacaggatcaatccctgaccctagtttgccccttccaaatcaacttgagatcgctctaaggaaaattaaggagaacattcgaataattctagaaacacgggcaacttgcaaatcactagaagagaaactaaaagagaaagaatctgctttaaggttagcagaacaaaatatactgtcaagagacaaagtaatcaatgaactgaggcttcgattgcctgccactgcagaaagagaaaagctcatagctgagctaggcagaaaagagatggaaccaaaatctcaccacacattgaaaattgctcatcaaaccattgcaaacatgcaagcaaggttaaatcaaaaagaagaagtattaaagaagtatcaacgtcttctagaaaaagccagagaggagcaaagagaaattgtgaagaaacatgaggaagaccttcatattcttcatcacagattagaactacaggctgatagttcactaaataaattcaaacaaacggcttgggatttaatgaaacagtctcccactccagttcctaccaacaagcattttattcgtctggctgagatggaacagacagtagcagaacaagatgactctctttcctcactcttggtcaaactaaagaaagtatcacaagatttggagagacaaagagaaatcactgaattaaaagtaaaagaatttgaaaatatcaaattacagcttcaagaaaaccatgaagatgaagtgaaaaaagtaaaagcggaagtagaggatttaaagtatcttctggaccagtcacaaaaggagtcacagtgtttaaaatctgaacttcaggctcaaaaagaagcaaattcaagagctccaacaactacaatgagaaatctagtagaacggctaaagagccaattagccttgaaggagaaacaacagaaagcacttagtcgggcacttttagaactccgggcagaaatgacagcagctgctgaagaacgtattatttctgcaacttctcaaaaagaggcccatctcaatgttcaacaaatcgttgatcgacatactagagagctaaagacacaagttgaagatttaaatgaaaatcttttaaaattgaaagaagcacttaaaacaagtaaaaacagagaaaactcactaactgataatttgaatgacttaaataatgaactgcaaaagaaacaaaaagcctataataaaatacttagagagaaagaggaaattgatcaagagaatgatgaactgaaaaggcaaattaaaagactaaccagtggattacagggcaaacccctgacagataataaacaaagtctaattgaagaactccaaaggaaagttaaaaaactagagaaccaattagagggaaaggtggaggaagtagacctaaaacctatgaaagaaaagaatgctaaagaagaattaattaggtgggaagaaggtaaaaagtggcaagccaaaatagaaggaattcgaaacaagttaaaagagaaagagggggaagtctttactttaacaaagcagttgaatactttgaaggatctttttgccaaagccgataaagagaaacttactttgcagaggaaactaaaaacaactggcatgactgttgatcaggttttgggaatacgagctttggagtcagaaaaagaattggaagaattaaaaaagagaaatcttgacttagaaaatgatatattgtatatgagggcccaccaagctcttcctcgagattctgttgtagaagatttacatttacaaaatagatacctccaagaaaaacttcatgctttagaaaaacagttttcaaaggatacatattctaagccttcaatttcaggaatagagtcagatgatcattgtcagagagaacaggagcttcagaaggaaaacttgaagttgtcatctgaaaatattgaactgaaatttcagcttgaacaagcaaataaagatttgccaagattaaagaatcaagtcagagatttgaaggaaatgtgtgaatttcttaagaaagaaaaagcagaagttcagcggaaacttggccatgttagagggtctggtagaagtggaaagacaatcccagaactggaaaaaaccattggtttaatgaaaaaagtagttgaaaaagtccagagagaaaatgaacagttgaaaaaagcatcaggaatattgactagtgaaaaaatggctaatattgagcaggaaaatgaaaaattgaaggctgaattagaaaaacttaaagctcatcttgggcatcagttgagcatgcactatgaatccaagaccaaaggcacagaaaaaattattgctgaaaatgaaaggcttcgtaaagaacttaaaaaagaaactgatgctgcagagaaattacggatagcaaagaataatttagagatattaaatgagaagatgacagttcaactagaagagactggtaagagattgcagtttgcagaaagcagaggtccacagcttgaaggtgctgacagtaagagctggaaatccattgtggttacaagaatgtatgaaaccaagttaaaagaattggaaactgatattgccaaaaaaaatcaaagcattactgaccttaaacagcttgtaaaagaagcaacagagagagaacaaaaagttaacaaatacaatgaagaccttgaacaacagattaagattcttaaacatgttcctgaaggtgctgagacagagcaaggccttaaacgggagcttcaagttcttagattagctaatcatcagctggataaagagaaagcagaattaatccatcagatagaagctaacaaggaccaaagtggagctgaaagcaccatacctgatgctgatcaactaaaggaaaaaataaaagatctagagacacagctcaaaatgtcagatctagaaaagcagcatttgaaggaggaaataaagaagctgaaaaaagaactggaaaattttgatccttcattttttgaagaaattgaagatcttaagtataattacaaggaagaagtgaagaagaatattctcttagaagagaaggtaaaaaaactttcagaacaattgggagttgaattaactagccctgttgctgcttctgaagagtttgaagatgaagaagaaagtcctgttaatttccccatttactaa

SEQ ID NO: 569 - DNA, 1518 bp, human
atgagctaccctggctatcccccgcccccaggtggctacccaccagctgcaccaggtggtggtccctggggaggtgctgcctaccctcctccgcccagcatgccccccatcgggctggataacgtggccacctatgcggggcagttcaaccaggactatctctcgggaatggcggccaacatgtctgggacatttggaggagccaacatgcccaacctgtaccctggggcccctggggctggctacccaccagtgccccctggcggctttgggcagcccccctctgcccagcagcctgttcctccctatgggatgtatccacccccaggaggaaacccaccctccaggatgccctcatatccgccatacccaggggcccctgtgccgggccagcccatgccaccccccggacagcagcccccaggggcctaccctgggcagccaccagtgacctaccctggtcagcctccagtgccactccctgggcagcagcagccagtgccgagctacccaggatacccggggtctgggactgtcacccccgctgtgcccccaacccagtttggaagccgaggcaccatcactgatgctcccggctttgaccccctgcgagatgccgaggtcctgcggaaggccatgaaaggcttcgggacggatgagcaggccatcattgactgcctggggagtcgctccaacaagcagcggcagcagatcctactttccttcaagacggcttacggcaaggatttgatcaaagatctgaaatctgaactgtcaggaaactttgagaagacaatcttggctctgatgaagaccccagtcctctttgacatttatgagataaaggaagccatcaagggggttggcactgatgaagcctgcctgattgagatcctcgcttcccgcagcaatgagcacatccgagaattaaacagagcctacaaagcagaattcaaaaagaccctggaagaggccattcgaagcgacacatcagggcacttccagcggctcctcatctctctctctcagggaaaccgtgatgaaagcacaaacgtggacatgtcactcgcccagagagatgcccaggagctgtatgcggccggggagaaccgcctgggaacagacgagtccaagttcaatgcggttctgtgctcccggagccgggcccacctggtagcagttttcaatgagtaccagagaatgacaggccgggacattgagaagagcatctgccgggagatgtccggggacctggaggagggcatgctggccgtggtgaaatgtctcaagaataccccagccttctttgcggagaggctcaacaaggccatgaggggggcaggaacaaaggaccggaccctgattcgcatcatggtgtctcgcagcgagaccgacctcctggacatcagatcagagtataagcggatgtacggcaagtcgctgtaccacgacatctcgggagatacttcaggggattaccggaagattctgctgaagatctgtggtggcaatgactga

SEQ ID NO: 570 - DNA, 2889 bp, human
atggaggactgcaatgtgcactcggccgccagcatcctggcctcggtgaaggagcaggaggcccgcttcgagaggctgacacgggcactggagcaggagcggcgccatgttgccctacagctggagcgtgcccagcagcctggcatggtcagtggtggcatgggcagtgggcagcccctgccaatggcctggcaacagctggtcctccaggagcagagcccaggcagccaggcctcactggccacgatgccggaggcacctgatgtgctggaggagaccgtgacggtggaggaggaccccggcacacccacttcccatgtgtctattgtcacatccgaagatggcacaacccggcgcaccgagaccaaggtcaccaagactgtcaagacggtgaccactcggacagtacgccaggtgcccgtgggcccagatggactccccctgctggatggcggccccccactaggcccttttgcagatggtgccctggaccggcatttcctgctgcgtggtggtggcccagtggccacactctctcgagcctacctcagcagtgggggtggctttcccgaaggccccgagccccgggacagccccagctatggcagcctgtcccgagggctgggcatgcggcccccacgtgctggcccccttggcccaggccctggtgatggctgcttcacactgcctggccaccgggaagccttcccggtgggtcctgagcctgggccaccaggtggccgctccctgcccgagcgcttccaggcagagccgtatggcttggaggatgacacgcgcagcctggccgctgatgacgagggtggccctgagctggagcctgactatggcacggccacaaggaggaggcctgagtgtgggcggggccttcataccagggcctacgaggacacagcagatgatggcggcgagctggcggacgagcggcctgcgttcccaatggtgacggcgcccctggcccagcctgaacggggcagcatgggcagcctggaccggctggtgcggcgctcgccctcagtggatagcgcccgcaaggagccgcgctggcgggaccctgagctgcctgaggtgctggccatgctgcggcaccccgtggaccccgtgaaggccaatgcggccgcctacctgcagcatctgtgctttgagaacgagggtgtcaagcggcgtgtacggcagttgcgggggctgccgctgcttgtggcactgctggaccacccgcgggctgaggtgcggcgccgggcctgtggggcactgcgcaacctctcctatggccgcgacactgacaacaaggccgccatccgggactgcggtggtgtgcctgccctggtgcgcctgctgagggctgcccgggacaacgaggtccgtgagcttgtcactggcaccctgtggaacctgtcatcctatgagcccctgaagatggtcatcattgaccatggcctgcagacgctgacccacgaggtgatcgtgccccactcaggatgggagcgtgagcccaacgaggactccaagccacgggacgccgagtggacaactgtcttcaagaacacgtcgggctgcctgaggaatgtgagctccgatggtgctgaggcccggcggcgactccgggagtgtgaagggctggtggacgcgctcctgcatgccctgcagtcggctgtgggccggaaggacactgacaacaagtcggtggagaactgcgtgtgcatcatgcggaacctgtcctaccacgtgcacaaggaggtgcccggggccgacaggtaccaggaggccgagcccgggcccctgggcagtgctgtaggctcccagcgccggaggcgggatgatgccagctgctttggaggcaagaaggccaaagaggagtggttccaccaaggaaagaaggatggtgagatggaccggaactttgacacgctagacctgcccaagcgaactgaggccgccaaaggctttgagctgctgtaccagcccgaggtggtacgtctctacctctccctcctcacggagagccggaacttcaacaccctggaggctgccgccggcgctctgcagaacctcagtgccggcaactggatgtgggccacgtacatccgcgccacagtgcgcaaagagcgcgggctgccggtgcttgtggaactgctgcagtctgagaccgacaaggtggtgcgcgccgtcgccatcgctctgcgcaacctctcgctggaccggcgcaacaaagacctcatcgggagctacgccatggctgagcttgtgcggaatgtgcgcaatgcacaggctccgccgcgaccgggggcctgcctggaggaagacaccgtggtggcggtgctcaacaccatccacgaaatcgtgtccgacagcctggataacgcgcgctcgctcctgcaggcacgcggggtgccagcgttggtggctctcgtggcctccagccaatcggtacgcgaagcgaaggcggcgtcacacgtgctgcagacagtgtggagctacaaggagctgcgtggtaccttgcagaaagatggttggaccaaggcgcgcttccagtcagctgctgctactgccaaggggcctaagggagcactgagtcctgggggcttcgatgacagcacgctgccactggtggacaagagccttgagggcgagaaaactggcagccgggatgtgatccccatggatgcgctgggcccagacggatactccacggtggaccggagggagcggaggccacggggcgccagctctgcaggagaggcctctgagaaggaacccttgaaactcgaccccagcaggaaggcccctccccccgggcccagcaggcccgcggtcaggctggtggacgccgtaggggacgctaagcctcagcccgttgattcctgggtctag

SEQ ID NO: 571 - DNA, 990 bp, human; identical to SEQ ID NO: 368

SEQ ID NO: 572 - DNA, 576 bp, human
atgggaaagaaaaccaagcggacagctgacagttcttcttcagaggatgaggaggagtatgttgtggagaaggtgctagacaggcgcgtggttaagggacaagtggaatatctactgaagtggaaaggcttttctgaggagcacaatacttgggaacctgagaaaaacttggattgccctgagctaatttctgaatttatgaaaaagtataagaagatgaaggagggtgaaaataataaacccagggagaagtcagaaagtaacaagaggaaatccaatttctcaaacagtgccgatgacatcaaatctaaaaaaaagagagagcagagcaatgatatcgctcggggctttgagagaggactggaaccagaaaagatcattggggcaacagattcctgtggtgatttaatgttcctaatgaaatggaaagacacagatgaagctgacctggttcttgcaaaagaagctaatgtgaaatgtccacaaattgtgatagcattttatgaagagagactgacatggcatgcatatcctgaggatgcggaaaacaaagagaaagaaacagcaaagagctaa

SEQ ID NO: 573 - DNA, 2592 bp, human
atgtcgtccccggcgtcgaccccgagccgccgcggcagccggcgtggaagggccacccccgcccagacgcctcggagtgaggatgccaggtcatctccctctcagagacgtagaggcgaggattccacctccacgggggagttgcagccgatgccaacctcgcctggagtggacctgcagagccctgctgcgcaggacgtgctgttttccagccctccccaaatgcattcttcagctatccctcttgactttgatgttagttcaccactgacatacggcactcccagctctcgggtagagggaaccccaagaagtggtgttaggggcacacctgtgagacagaggcctgacctgggctctgcacagaagggcctgcaagtggatctgcagtctgacggggcagcagcagaagatatagtggcaagtgagcagtctctaggccaaaaacttgtgatctggggaacagatgtaaatgtggcagcatgcaaagaaaactttcagagatttcttcagcgttttattgaccctctggctaaagaagaagaaaatgttggcatagatattactgaacctctatacatgcaacgacttggggagattaatgttattggtgagccatttttaaatgtgaactgtgaacacatcaaatcatttgacaaaaatttgtacagacaactcatctcttacccacaggaagttattccaacttttgacatggctgtcaatgaaatcttctttgaccgttaccctgactcaatcttagaacatcagattcaagtaagaccattcaacgcattgaagactaagaatatgagaaacctgaatccagaagacattgaccagctcatcaccatcagcggcatggtgatcaggacatcccagctgattcccgagatgcaggaggccttcttccagtgccaagtgtgtgcccacacgacccgggtggagatggaccgcggccgcattgcagagcccagtgtgtgcgggcgctgccacaccacccacagcatggcactcatccacaaccgctccctcttctctgacaagcagatgatcaagcttcaggagtctccggaagacatgcctgcagggcagacaccacacacagttatcctgtttgctcacaatgatctcgttgacaaggtccagcctggggacagagtgaatgttacaggcatctatcgagctgtgcctattcgagtcaatccaagagtgagtaatgtgaagtctgtctacaaaacccacattgatgtcattcattatcggaaaacggatgcaaaacgtctgcatggccttgatgaagaagcagaacagaaacttttttcagagaaacgtgtggaattgcttaaggaactttccaggaaaccagacatttatgagaggcttgcttcagccttggctccaagcatttatgaacatgaagatataaagaagggaattttgcttcagctctttggcgggacaaggaaggattttagtcacactggaaggggcaaatttcgggctgagatcaacatcttgctgtgtggcgaccctggtaccagcaagtcccagctgctgcagtacgtgtacaacctcgtccccaggggccagtacacgtctgggaagggctccagtgcagttggcctcactgcgtacgtaatgaaagaccctgagacaaggcagctggtcctgcagacaggtgctcttgtcctgagtgacaacggcatctgctgtatcgatgagttcgacaagatgaatgaaagtacaagatcggtattgcatgaagtcatggaacagcagactctgtccattgcaaaggctgggatcatctgtcagctcaatgcgcgcacctctgtcctggcagcagcaaatcccattgagtctcagtggaatcctaaaaaaacaaccattgaaaacatccagctgcctcatactttattatcaaggtttgatttgatcttcctcttgctggaccctcaggacgaagcctatgacaggcgtctggctcaccacctggtcgcactgtactaccagagcgaggagcaggcagaggaggagctcctggacatggcggtgctaaaggactacattgcctacgcgcacagcaccatcatgccgcggctaagtgaggaagccagccaggctctcatcgaggcttatgtagacatgaggaagattggcagtagccggggaatggtttctgcataccctcgacagctagagtcattaatccgcttagcagaagcccatgctaaagtaagattgtctaacaaagttgaagccattgatgtggaagaggccaaacgcctccatcgggaagctctgaagcagtctgcaactgatccccggactggcatcgtggacatatctattcttactacggggatgagtgccacctctcgtaaacggaaagaagaattagctgaagcattgaaaaagcttattttatctaagggcaaaacaccagctctaaaataccagcaactttttgaagatattcggggacaatctgacatagcaattactaaagatatgtttgaagaagcactgcgtgccctggcagatgatgatttcctgacagtgactgggaagaccgtgcgcttgctctga

SEQ ID NO: 574 - DNA, 7095 bp, human
atgacgaccacagtagccacagactatgacaacattgagatccagcagcagtacagtgatgtcaacaaccgctgggatgtcgacgactgggacaatgagaacagctctgcgcggctttttgagcggtcccgcatcaaggctctggcagatgagcgtgaagccgtgcagaagaagaccttcaccaagtgggtcaattcccaccttgcccgtgtgtcctgccggatcacagacctgtacactgaccttcgagatggacggatgctcatcaagctgctggaggtcctctctggagagaggctgcctaaacccaccaagggacgaatgcgcatccactgcttagagaatgtggacaaggcccttcagttcctgaaggagcagagagtccatcttgagaacatggggtcccatgacatcgtggatggaaaccaccggctgacccttggcctcatctggaccatcatcctgcgcttccagatccaggatatcagtgtggaaactgaagacaacaaagagaagaaatctgccaaggatgcattgctgttgtggtgccagatgaagacagctgggtaccccaatgtcaacattcacaatttcaccactagctggagggacggcatggccttcaatgcactgatacacaaacaccggcctgacctgatagattttgacaaactaaagaaatctaacgcacactacaacctgcagaatgcatttaatctggcagaacagcacctcggcctcactaaactgttggaccccgaagacatcagcgtggaccatcctgatgagaagtccataatcacttatgtggtgacttattaccactacttctctaagatgaaggccttagctgttgaaggaaaacgaattggaaaggtgcttgacaatgctattgaaacagaaaaaatgattgaaaagtatgaatcacttgcctctgaccttctggaatggattgaacaaaccatcatcattctgaacaatcgcaaatttgccaattcactggtcggggttcaacagcagcttcaggcattcaacacttaccgcactgtggagaaaccacccaaatttactgagaaggggaacttggaagtgctgctcttcaccattcagagcaagatgagggccaacaaccagaaggtctacatgccccgggaggggaagctcatctctgacatcaacaaggcctgggaaagactggaaaaagcggaacacgaaagagaactggctttgcggaatgagctcataagacaggagaaactggaacagctcgcccgcagatttgatcgcaaggcagctatgagggagacttggctgagcgaaaaccagcgtctggtgtctcaggacaactttgggtttgaccttcctgcagttgaggccgccacaaaaaagcacgaggccattgagacagacattgccgcatacgaggagcgtgtgcaggctgtggtagccgtggccagggagctcgaggccgagaattaccacgacatcaagcgcatcacagcgaggaaggacaatgtcatccggctctgggaatacctactggaactgctcagggcccggagacagcggctcgagatgaacctggggctgcagaagatattccaggaaatgctctacattatggactggatggatgaaatgaaggtgctagtattgtctcaagactatggcaaacacttacttggtgtggaagacctgttacagaagcacaccctggttgaagcagacattggcatccaggcagagcgggtgagaggtgtcaatgcctccgcccagaagttcgcaacagacggggaaggttacaagccctgtgacccccaggtgatccgagaccgcgtggcccacatggagttctgttatcaagagctttgccagctggcggctgagcgcagggcccgtctggaagagtcccgccgcctctggaagttcttctgggagatggcagaagaggaaggctggatacgggagaaggagaagatcctgtcctcggacgattacgggaaagacctgaccagcgtcatgcgcctgctcagcaagcaccgggcgttcgaggacgagatgagcggccgcagtggccactttgagcaggccatcaaggaaggcgaagacatgatcgcggaggagcacttcgggtcggagaagatccgtgagaggatcatttacatccgggagcagtgggccaacctagagcagctctcggccattcggaagaagcgcctggaggaggcctccctgctgcaccagttccaggcagatgctgatgacattgatgcctggatgctggacatcctcaagattgtctccagcagcgacgtgggccacgatgagtattccacacagtctctggtcaagaaacacaaggacgtggcggaagagatcgccaattacaggcccacccttgacacgctgcacgaacaagccagcgccctcccccaggagcatgccgagtctccagacgtgaggggcaggctgtcgggcatcgaggagcggtataaggaggtggcagagctgacgcggctgcggaagcaggcactccaggacactctggccctgtacaagatgttcagcgaggctgatgcctgtgagctctggatcgacgagaaggagcagtggctcaacaacatgcagatcccagagaagctggaggatctggaggtcatccagcacagatttgagagcctagaaccagaaatgaacaaccaggcttcccgggttgcagtggtgaaccagattgcacgccagctgatgcacagcggccacccaagtgagaaggaaatcaaagcccagcaggacaaactcaacacaaggtggagccagttcagagaactggttgacaggaagaaggatgccctcctgtctgccctgagcatccagaactaccacctcgagtgcaatgaaaccaaatcctggattcgggaaaagaccaaggtcatcgagtccacccaggacctgggcaatgacctggctggcgtcatggccctgcagcgcaagctgaccggcatggagcgggacttggtggccattgaggcaaagctgagtgacctgcagaaggaggcggagaagctggagtccgagcaccccgaccaggcccaggccatcctgtctcggctggccgagatcagcgacgtgtgggaggagatgaagaccaccctgaaaaaccgagaggcctccctgggagaggccagcaagctgcagcagttcctacgggacttggacgacttccagtcctggctctctaggacccagacagcgatcgcctcggaggacatgccaaacaccctgaccgaggctgagaagctgctcacgcagcacgagaacatcaagaacgagatcgacaactacgaggaggactaccagaagatgagggacatgggcgagatggtcacccaggggcagaccgatgcccagtacatgtttctgcggcagcggctgcaggccctggacactggatggaacgagctccacaagatgtgggagaacagacaaaatctcctatcccagtcacatgcctaccagcagttcctcagagacacgaagcaagccgaagcctttcttaacaaccaggagtatgttctggctcacactgaaatgcctaccaccttggaaggagctgaagcagcaattaaaaagcaagaggacttcatgaccaccatggacgccaatgaggagaagatcaatgctgtggtggagactggccggaggctggtgagcgatgggaacatcaactcagatcgcatccaggagaaggtggactctattgatgacagacataggaagaatcgtgagacagccagtgaacttttgatgaggttgaaggacaacagggatctacagaaattcctgcaagattgtcaagagctgtctctctggatcaatgagaagatgctcacagcccaggacatgtcttacgatgaagccagaaatctgcacagtaaatggttgaagcatcaagcatttatggcagaacttgcatccaacaaagaatggcttgacaaaatcgagaaggaaggaatgcagctcatttcagaaaagcctgagacggaagctgtggtgaaggagaaactcactggtttacataaaatgtgggaagtccttgaatccactacccagacaaaggcccagcggctctttgatgcaaacaaggccgaacttttcacccagagctgtgcagatctagacaaatggctgcacggcctggagagtcagattcagtctgatgactatggcaaagacctgaccagtgtcaatatcctgctgaaaaagcaacagatgctggagaatcagatggaagtgcggaagaaggagatcgaagagctccaaagccaagcccaggccctgagtcaggaagggaagagcaccgacgaggtagacagcaagcgcctcaccgtgcagaccaagttcatggagttgctggagcccttgaacgagaggaagcataacctgctggcctccaaagagatccatcagttcaacagggatgtggaggacgagatcttgtgggttggagagaggatgcctttggcaacttccacggatcatggccacaacctccagactgtgcagctgttaataaagaaaaatcagaccctccagaaagaaatccaggggcaccagcctcgcattgacgacatctttgagaggagccaaaacatcgtcactgacagcagcagcctcagcgctgaggccatcagacagaggcttgccgacctgaagcagctgtggggtctcctcattgaggagacagagaaacgccacaggcggctggaggaggcgcacagggcccagcagtactactttgacgctgctgaggccgaagcctggatgagcgagcaggagctgtacatgatgtcagaggagaaggccaaggatgagcagagtgctgtctccatgttgaagaagcaccagatcttagaacaagctgtggaggactatgcagagaccgtgcatcagctctccaagaccagccgggccctggtggccgacagccatcctgaaagtgagcgcattagcatgcggcagtccaaagtggataaactgtacgctggtctgaaagaccttgctgaagagagaagaggcaagctggatgagagacacaggttattccagctcaaccgggaggtggacgacctggagcagtggatcgctgagagggaggtggtcgcagggtcccatgaactgggacaggactatgagcatgtcacgatgttacaagaacgattccgggagtttgcccgagacaccgggaacattgggcaggagcgcgtggacacggtcaatcacctggcagatgagctcatcaactctggacattcagatgccgccaccatcgctgaatggaaggatggcctcaatgaagcctgggccgacctcctggagctcattgacacaagaacacagattcttgccgcttcctatgaactgcacaagttttaccacgatgccaaggagatctttgggcgtatacaggacaaacacaagaaactccctgaggagcttgggagagatcagaacacagtggagaccttacagagaatgcacactacatttgagcatgacatccaggctctgggcacacaggtgaggcagctgcaggaggatgcagcccgcctccaggcggcctatgcgggtgacaaggccgacgatatccagaagcgcgagaacgaggtcctggaagcctggaagtccctcctggacgcctgtgagagccgcagggtgcggctggtggacacaggggacaagttccgcttcttcagcatggtgcgcgacctcatgctctggatggaggatgtcatccggcagatcgaggcccaggagaagccaagggatgtatcatctgttgaactcttaatgaataatcatcaaggcatcaaagctgaaattgatgcacgtaatgacagtttcacaacctgcattgaacttgggaaatccctgttggcgagaaaacactatgcatctgaggagatcaaggaaaaattactgcagttgacggaaaagaggaaagaaatgatcgacaagtgggaagaccgatgggaatggttaagactgattctggaggtccatcagttctcaagagacgccagtgtggccgaggcctggctgcttggacaggagccgtacctatccagccgagagataggccagagcgtggacgaggtggagaagctcatcaagcgccacgaggcatttgaaaagtctgcagcaacctgggatgagaggttctctgccctggaaaggctgactacattggagttactggaagtgcgcagacagcaagaggaagaggagaggaagaggcggccgccttctcccgagccgagcacgaaggtttcagaggaagccgagtcccagcagcagtgggatacttcaaaaggagaacaagtttcccaaaacggtttgccagctgaacagggatctccacggatggcagaaacggtggacacaagcgaaatggtcaacggcgctacagaacaaaggacgagctctaaagagtccagccccatcccctccccgacctctgatcgtaaagccaagactgccctcccagcccagagtgccgccaccttaccagccagaacccaggagacaccttcggcccagatggaaggcttcctcaatcggaaacacgagtgggaggcccacaataagaaagcctcaagcaggtcctggcacaatgtttattgtgtcataaataaccaagaaatgggtttctacaaagatgcaaagactgctgcttctggaattccctaccacagcgaggtccctgtgagtttgaaagaagctgtctgcgaagtggcccttgattacaaaaagaagaaacacgtattcaagctaagactaaatgatggcaatgagtacctcttccaagccaaagacgatgaggaaatgaacacatggatccaggctatctcttccgccatctcctctgataaacacgaggtgtctgccagcacccagagcacgccagcatccagccgcgcgcagaccctccccaccagcgtcgtcaccatcaccagcgagtccagtcccggcaagcgggaaaaggacaaagagaaagacaaagagaagcggttcagcctttttggcaaaaagaaatga

SEQ ID NO: 575 - DNA, 1860 bp, human
atgtcaggcctggtgttggggcagcgggatgagcctgcaggccaccggctcagccaagaggagatcctggggagcacacggctggtcagccaagggctagaggccctacgcagtgaacaccaggccgtgctgcaaagcctgtcccagaccattgagtgtctgcagcagggaggccatgaggaagggctggtgcatgagaaggcccggcagcttcgccgttctatggaaaacattgagctcgggctgagtgaggcccaggtgatgctggctctagccagccacctgagcacagtggagtcggagaaacagaagctgcgggctcaggtgcggcggctatgccaggagaaccagtggctgcgggatgagctggctggcacccagcagcggctacagcgcagtgaacaggctgtggctcagctggaggaggaaaagaagcacctggagttcctggggcagctgcggcagtatgatgaggatggacatacctcggaggagaaagaaggcgatgccaccaaggattccctggatgacctctttcctaatgaggaggaagaggaccccagcaatggcttgtcccgtggtcaaggtgctacagcagctcagcagggtggatatgagatcccagcaaggttgcggacgttgcacaacctggtgatccagtacgcagcccaaggtcgctatgaggtggccgtgccactctgtaagcaggcactagaggacctggagcgcacatcaggccgtggccaccctgatgtcgccaccatgctcaacatccttgctttggtgtatcgtgaccagaataagtataaggaagctgcccacctgctgaatgatgcccttagcatccgggagagcaccttgggacctgaccatcctgctgtggctgccacactcaacaatttggctgtgctctatggcaaaaggggcaagtacaaggaggcagagcctctgtgccagcgggcactggagattcgagaaaaggtcctgggcacgaatcatccagatgtggcaaaacagctgaacaacctggccctcttgtgccaaaaccagggcaagtatgaggccgtggaacgctactaccagcgagcactggccatctacgaggggcagctggggccggacaaccctaatgtagcccggaccaagaacaacctggcttcctgttacctgaaacagggcaaatatgctgaggctgagacactatacaaagagatcctgacccgtgcccatgtacaggagtttgggtctgtggatgatgaccacaagcccatctggatgcatgcagaggagcgggaggaaatgagcaaaagccggcaccatgagggtgggacaccctatgctgagtatggaggctggtacaaggcctgcaaagtgagcagccccacagtgaacactactctgagaaacctgggagctctgtataggcgccagggaaagctggaggctgctgagaccctggaggaatgtgccctgcggtcccggagacagggcactgaccctatcagccagacgaaggtggcagagctgcttggggagagtgatggtagaaggacctcccaggagggccctggagacagtgtgaaattcgagggaggtgaagatgcttctgtggctgtggagtggtccggggatggcagtgggaccctgcagaggagtggctctcttggcaagatccgggatgtgctccgcagaagcagtgaactcttggtgaggaagctccaggggactgagcctcggccctccagcagcaacatgaagcgagcagcctccttgaactatctgaaccaacctagtgcagcacccctccaggtctcccggggcctcagtgccagcaccatggacctctcttcaagcagctga

SEQ ID NO: 576 - DNA, 954 bp, human
atgtggctctacctggcggttttcgtgggcctgtactaccttctgcactggtaccgggagaggcaggtgctgagccacctgagagataagtatgtgttcatcacgggctgtgactctggcttcgggaaactgctggccagacagctggatgcacgaggcttgcgggtgctggctgcatgtctgacggagaaaggagccgagcagctgaggggccagacttcagacaggctggagacggtgaccctggatgttaccaagacagagagcgttgctgcagccgcccagtgggtgaaggagtgcgtgagagacaaaggactctggggcctggtgaataatgctggcatctccttgcccacggctcccaatgagttgctcaccaagcaggacttcgtgaccatactggacgtgaacttgttgggggtgattgatgtgactctgagcctgctgcccttagtgaggagggccaggggccgtgtggtcaacgtctccagtgtcatgggccgggtgtcactttttggtggaggctactgcatctccaagtatggcgtggaagccttctctgactccctcaggagggaactctcctactttggggtgaaggtggctatgattgaacctggctatttcaagactgctgtgaccagtaaggagagattcttaaagagcttcctggagatttgggaccggtccagtccagaggtcaaggaggcctatggcgagaagtttgttgcagactataagaaatcagctgaacaaatggagcagaagtgcacacaggatctgtcgttggtgaccaactgcatggagcatgcgctgattgcctgccacccccgtactcgctactcagctggctgggatgccaagcttctctacctccccatgagctacatgcccaccttcctggtggatgccattatgtactgggtctctccaagcccggccaaggctctatga

SEQ ID NO: 577 - DNA, 1239 bp, human
atggcggggaaggcggccgccccgggcaccgcggtgctgctggtcacggccaacgtgggctcgctcttcgacgacccagaaaacctgcagaagaactggcttcgggaattttaccaggtcgtgcacacacacaagccgcacttcatggccttgcactgtcaggagtttggagggaagaactacgaggcctccatgtcccacgtggacaagttcgtcaaagaactattgtcgagtgatgcgatgaaagaatataacagggctcgagtctacctggatgaaaactacaaatcccaggagcacttcacggcactaggaagcttttattttcttcatgagtccttaaaaaacatctaccagtttgactttaaagctaagaagtatagaaaggtcgctggcaaagagatctactcggataccttagagagcacgcccatgctggagaaggagaagtttccgcaggactacttccccgagtgcaaatggtcaagaaaaggcttcatccggacgaggtggtgcattgcagactgtgcctttgacttggtgaatatccatcttttccatgatgcttccaatctggtcgcctgggaaacaagcccttccgtgtactcgggaatccggcacaaggcactgggctacgtgctggacagaatcattgatcagcgattcgagaaggtttcctactttgtatttggtgatttcaacttccggctggattccaagtccgtcgtggagacgctctgcacaaaagccaccatgcagacggtccgggccgccgacaccaatgaagtggtgaagctcatatttcgtgagtcggacaacgaccggaaggttatgctccagttagaaaagaaactcttcgactacttcaaccaggaggttttccgagacaacaacggcaccgcgctcttggagtttgacaaggagttgtctgtctttaaggacagactgtatgaactggacatctcgttccctcccagctacccgtacagtgaggacgcccgccagggtgagcagtacatgaacacccggtgcccagcctggtgtgaccgcatcctcatgtccccgtctgccaaggagctggtgctgcggtcggagagcgaggagaaggttgtcacctatgaccacattgggcccaacgtctgcatgggagaccacaagcccgtgttcctggccttccgaatcatgcccggggcaggtaaacctcatgcccatgtgcacaagtgttgtgtcgtgcagtga

SEQ ID NO: 578 - DNA, 918 bp, human
atggggatcttactgggcctgctactcctggggcacctaacagtggacacttatggccgtcccatcctggaagtgccagagagtgtaacaggaccttggaaaggggatgtgaatcttccctgcacctatgaccccctgcaaggctacacccaagtcttggtgaagtggctggtacaacgtggctcagaccctgtcaccatctttctacgtgactcttctggagaccatatccagcaggcaaagtaccagggccgcctgcatgtgagccacaaggttccaggagatgtatccctccaattgagcaccctggagatggatgaccggagccactacacgtgtgaagtcacctggcagactcctgatggcaaccaagtcgtgagagataagattactgagctccgtgtccagaaacactcctcaaagctactcaagaccaagactgaggcacctacaaccatgacataccccttgaaagcaacatctacagtgaagcagtcctgggactggaccactgacatggatggctaccttggagagaccagtgctgggccaggaaagagcctgcctgtctttgccatcatcctcatcatctccttgtgctgtatggtggtttttaccatggcctatatcatgctctgtcggaagacatcccaacaagagcatgtctacgaagcagccagggcacatgccagagaggccaacgactctggagaaaccatgagggtggccatcttcgcaagtggctgctccagtgatgagccaacttcccagaatctgggcaacaactactctgatgagccctgcataggacaggagtaccagatcatcgcccagatcaatggcaactacgcccgcctgctggacacagttcctctggattatgagtttctggccactgagggcaaaagtgtctgttaa

SEQ ID NO: 579 - DNA, 822 bp, human
atgggccggtctcggagccggagctcgtcccgctccaagcacaccaagagcagcaagcacaacaagaagcgcagccggtcccggtcgcgatcccgggacaaggagcgcgtgcggaagcgttccaaatctcgggaaagtaaacggaaccggcggcgggagtcgcggtcccgttcgcgctccaccaacacggccgtgtcccggcgcgagcgggaccgggagcgcgcctcgtccccgcccgaccgcatcgacatcttcgggcgcacggtgagcaagcgcagcagcctggacgagaagcagaagcgagaggaggaggagaagaaagcggagttcgagcggcagcgaaaaattcgacagcaagaaatagaagaaaaactcatcgaggaagaaacagcacgaagagtagaagaattggtagcaaaaagggtggaggaagaactggagaaaaggaaggatgaaattgaacgagaagttctccgaagggtggaggaagccaaacgcatcatggaaaagcagttgctcgaagaactcgagcgacagagacaagctgagcttgccgcacaaaaagctagagaggaggaagaacgtgcaaaacgtgaggagctagagcgaatactggaagagaataaccgaaaaattgcagaagcacaagccaaactggccgaagaacagttgagaattgttgaagaacaaagaaagattcatgaggaaaggatgaaactagaacaagaacgacaacgtcaacaaaaagaagaacaaaaaattatcctgggcaaggggaagtccaggccaaaactgtccttctcattaaaaacccaggattaa

SEQ ID NO: 580 - DNA, 4137 bp, human
atgagcctggagcgcgagcttcgccagctgagcaaggcgaaagccaaggcgcagagggccgggcagcggcgcgaagaggccgcgctgtgccaccagctgggggagctcctggccggccatggccgctacgccgaggctctggagcagcactggcaggagctgcagcttcgggagcgcgctgacgaccctctgggctgtgccgtggcccaccgcaagatcggagagcgcctggccgagatggaggactacccggctgccttgcagcaccagcaccagtacctggagctggcacattccctgcgcaaccacacggagctgcagagggcctgggccaccatcggccgcacccacctggacatctatgaccactgccagtcgagggatgctttgctgcaggcacaggctgcctttgagaagagcttggctattgtggatgaggagctggaggggacactggcccagggagagctgaatgagatgaggacccgcctctatctcaacctgggcctcacctttgagagcctgcagcagacagccctgtgcaacgattacttcaggaagagcatcttccttgcggagcagaaccacctttacgaggacctattccgcgcccgctacaacctgggcaccatccactggcgcgcgggccagcactcccaggctatgcgctgcttggagggtgcccgggagtgtgcgcacaccatgaggaagcggttcatggagagcgagtgctgcgtggttattgcacaggtcctccaagacctgggagactttttggctgccaagcgagccctgaagaaggcctacaggctgggctcccagaagcctgtgcagagggcagccatctgtcagaacctccagcatgtgctggcagtggtccggctgcagcaacagctggaagaggctgagggcagagaccctcagggtgccatggtcatctgtgagcagctaggggacctcttctccaaggcaggagactttcccagggcagctgaggcttaccagaagcagctgcgttttgctgagctgctggacagaccgggtgctgagcgggccatcatccacgtgtccctggccaccacactgggagacatgaaggaccaccatggggccgtgcgccactatgaggaggaactgaggctgcgcagcggcaacgtgctggaggaggccaagacctggctgaacattgcactgtcccgcgaggaggccggcgatgcctacgagctgctggccccgtgcttccagaaagcgctcagctgtgcccagcaggcccagcgtccccagctgcagaggcaggtcttgcagcatctccataccgtgcagctgaggctgcagccccaggaggcccctgagaccgaaaccagactacgggagctcagtgtagctgaagatgaagatgaggaggaggaggcggaggaggcggcagccacagcggagagcgaagccctggaggccggcgaggtggagctctcagagggcgaggacgacaccgatggcctgaccccgcagctggaggaggacgaggagcttcagggccacctgggccggcggaaggggagcaagtggaaccggcgaaacgacatgggggagaccctgctgcaccgagcctgcatcgagggccagctgcgccgcgtccaggaccttgtgaggcagggccacccccttaaccctcgggactactgtggctggacacctctgcacgaggcctgcaactacgggcatctagaaattgtccgcttcctgctggaccacggggccgcagtggacgacccaggtggccagggctgcgaaggcatcacccccctccacgatgccctcaactgtggccacttcgaggtggctgagctgctgcttgaacggggggcgtccgtcaccctccgcactcgaaagggcctcagcccgctggagacgctgcagcagtgggtgaagctgtaccgcagggacctggacctggagacgcggcagaaggccagggccatggagatgctgctccaggcggctgcctcgggccaagatccccacagctcccaggccttccacaccccaagcagccttctgtttgaccccgagacctctcctcctttgagcccctgcccagaacccccctctaatagcactagactcccagaggcctctcaggcccatgtcagggtctccccagggcaggcggcaccagccatggccaggcctcggaggagcaggcatgggccagccagcagcagcagcagctcagaaggcgaggacagcgcaggccccgcacggccgtcccagaagaggcctcggtgctcggccacagcacaacgggtggcagcctggacgcctggccccgccagcaacagggaagcagccacagccagcaccagccgggcagcctaccaggcagccatccggggtgtgggcagtgctcagagccggctggggcctggcccaccgcggggccacagcaaagcccttgccccccaggcagcgctcatcccggaggaggagtgcctggccggggactggctggagctggacatgcccctgacccgcagccgccggccccgcccccggggcactggagacaaccgcaggcccagtagtacctctgggtcggacagtgaggagagcaggccccgtgcccgagccaagcaggtccgcctgacctgcatgcagagttgcagtgcgccagttaacgcagggcccagcagcctggcttcagaacctccagggagccccagcacccccagggtctcagagcccagtggggacagctctgcggcaggccagcccttgggtccggccccgccccctcccatccgggttcgagttcaagttcaggatcatctcttcctcatccctgtcccacacagcagtgacacccactctgtggcctggctggccgagcaggcggcccagcgctactaccagacctgcgggctgctgcccaggctcaccctacggaaagagggggccctgctggccccacaggacctcatccctgatgtgctgcagagcaatgacgaggtgttggctgaggtgacttcgtgggacctgcccccgttgactgaccgctaccgcagggcctgccagagcctggggcaaggggagcaccaacaggtgctgcaggccgtggagctccagggcttgggcctctcgttcagcgcctgctccctggccctggaccaggcccagcttacacccctgctgcgggccctcaagctgcacacagcactccgggagctgcgcctggcagggaaccggctgggggacaagtgtgtggctgagctggtggctgccctgggcaccatgcccagcctggccctccttgacctctcctccaatcacctgggtcccgaaggcctgcgccagcttgccatggggctcccaggccaagccaccttgcagagtttggaggagctggacttaagcatgaaccccctgggggacggctgtggccagtccctggcctccctcctgcacgcctgccccttactcagcaccctgcgcctgcaggcgtgtggcttcggccccagcttctttctgagccaccagacagcactgggtagtgctttccaagatgctgagcacctgaagaccctgtccctgtcctacaacgccctgggagcccctgccctggccaggaccctgcagagcctgcccgccggcaccctcctgcacttagagctcagctccgtggcagccggcaagggtgattcggacctcatggagcctgtattccgatacctggccaaggaaggctgtgctctagcccacctgaccctgtctgcaaaccacctgggggacaaggctgttagagacctgtgcagatgtctctctctgtgcccctcactcatctcactggatctgtctgccaaccctgagatcagctgtgccagcttggaagagctcctgtccaccctccaaaagcggccccaaggccttagcttccttggcctgtcaggctgcgccgtccagggtcccctgggcctgggcctgtgggacaagatagccgcgcagctccgggaactgcagctgtgcagcagacgcctctgcgctgaggacagggacgccctgcgccagctgcagcccagtcggccgggccccggcgagtgcacgctggaccacggctccaagctcttctttcggcgcctctga

SEQ ID NO: 581 - DNA, 612 bp, human
atggcggaggtgcaggtcctggtgcttgatggtcgaggccatctcctgggccgcctggcggccatcgtggctaaacaggtactgctgggccggaaggtggtggtcgtacgctgtgaaggcatcaacatttctggcaatttctacagaaacaagttgaagtacctggctttcctccgcaagcggatgaacaccaacccttcccgaggcccctaccacttccgggcccccagccgcatcttctggcggaccgtgcgaggtatgctgccccacaaaaccaagcgaggccaggccgctctggaccgtctcaaggtgtttgacggcatcccaccgccctacgacaagaaaaagcggatggtggttcctgctgccctcaaggtcgtgcgtctgaagcctacaagaaagtttgcctatctggggcgcctggctcacgaggttggctggaagtaccaggcagtgacagccaccctggaggagaagaggaaagagaaagccaagatccactaccggaagaagaaacagctcatgaggctacggaaacaggccgagaagaacgtggagaagaaaattgacaaatacacagaggtcctcaagacccacggactcctggtctga

SEQ ID NO: 582 - DNA, 897 bp, human
atggtaagaatggtgcctgtcctgctgtctctgctgctgcttctgggtcctgctgtcccccaggagaaccaagatggtcgttactctctgacctatatctacactgggctgtccaagcatgttgaagacgtccccgcgtttcaggcccttggctcactcaatgacctccagttctttagatacaacagtaaagacaggaagtctcagcccatgggactctggagacaggtggaaggaatggaggattggaagcaggacagccaacttcagaaggccagggaggacatctttatggagaccctgaaagacatcgtggagtattacaacgacagtaacgggtctcacgtattgcagggaaggtttggttgtgagatcgagaataacagaagcagcggagcattctggaaatattactatgatggaaaggactacattgaattcaacaaagaaatcccagcctgggtccccttcgacccagcagcccagataaccaagcagaagtgggaggcagaaccagtctacgtgcagcgggccaaggcttacctggaggaggagtgccctgcgactctgcggaaatacctgaaatacagcaaaaatatcctggaccggcaagatcctccctctgtggtggtcaccagccaccaggccccaggagaaaagaagaaactgaagtgcctggcctacgacttctacccagggaaaattgatgtgcactggactcgggccggcgaggtgcaggagcctgagttacggggagatgttcttcacaatggaaatggcacttaccagtcctgggtggtggtggcagtgcccccgcaggacacagccccctactcctgccacgtgcagcacagcagcctggcccagcccctcgtggtgccctgggaggccagctag

SEQ ID NO: 583 - DNA, 435 bp, human; identical to SEQ ID NO: 111

SEQ ID NO: 584 - DNA, 2424 bp, human
atgaaggaatggaaatcaaagatggaaatttctgaagaaaagaagtcagcaagggctgcatccgaaaaactccaaagacaaatcacccaggaatgtgagttagttgaaaccagtaattctgaggacagattattgaagcactgggtaagccctttaaaggatgcaatgagacatctcccttcccaagagagcggtatcagggaaatgcatattatcccccagaaagccattgtgggagagattggccatggatgtaatgaaggagaaaaaatactttctgcaggagaaagctcccatagatatgaggttagtggccaaaacttcaaacagaagtcaggattaactgaacatcagaaaattcataatataaataagacctatgaatgtaaggaatgtgaaaaaaccttcaacaggagttcaaacctgatcatacatcagagaattcatacaggaaataagccatatgtgtgtaatgaatgtgggaaagactctaatcaaagttcaaatcttattatacatcagagaattcatacaggaaagaaaccttatatatgtcatgaatgtggaaaagacttcaatcagagctccaatctggtgagacataagcaaattcacagtggtgggaatccctatgagtgcaaagagtgtgggaaggcttttaagggaagctcaaaccttgtcctgcaccagagaatccacagtagggggaagccatatttatgcaataaatgtgggaaggctttcagtcaaagcacagatcttattatacatcacagaattcacactggagagaaaccctatgaatgttatgactgtggacagatgttcagtcaaagttcacaccttgtcccacatcagagaattcacactggagagaaacccctcaaatgtaatgaatgtgaaaaagccttcaggcagcattctcaccttactgaacaccagagactccacagtggagagaaaccctatgaatgtcacagatgtgggaagaccttcagtgggcgcacagcttttcttaaacatcagagattgcatgctggagagaaaattgaagaatgtgagaaaaccttcagcaaggatgaggagcttagggaagagcagagaattcaccaggaagagaaagcttattggtgtaatcagtgtggtaggaatttccagggcacctcagacctcatcagacatcaggtaactcatacaggagagaaaccatatgaatgtaaagaatgtgggaaaactttcaatcagagctcagaccttctgagacatcatagaattcacagtggagaaaaaccttgtgtatgtagcaaatgtgggaaatcttttaggggcagctcagatcttattagacaccatcgtgttcatactggagagaaaccctatgaatgtagtgaatgtgggaaagcctttagccagaggtcacaccttgttacacaccagaaaatccatactggagagaagccctatcagtgcactgaatgtgggaaagccttcaggcggcgttcactccttattcaacatcggagaattcatagtggtgagaaaccctatgaatgtaaggaatgtgggaagctcttcatttggcgcacagctttcctcaaacatcagagcctgcatactggagagaaacttgaatgtgagaaaaccttcagccaggatgaggagcttaggggagagcagaaaattcaccaggaagcgaaagcttattggtgtaatcagtgtggtagggctttccagggcagctcagacctcatcagacatcaggtaactcatacaagagagaaaccatatgaatgcaaagaatgtgggaaaactttcaatcagagctcagaccttctgagacatcatagaattcacagtggagaaaaaccttatgtatgcaacaaatgtgggaaatcttttaggggtagctcagatcttattaaacaccatcgtattcatactggagagaaaccctatgaatgtagtgaatgtgggaaagccttcagccagaggtcacaccttgctacacaccagaaaatccatactggagagaaaccctatcagtgcagtgaatgtgggaatgccttcaggcggcgttccctccttattcaacatcggagacttcatagtggtgagaaaccctatgaatgtaaggaatgtgggaaactcttcatgtggcacacggctttcctcaaacatcagagactgcatgctggagagaaacttgaagaatgtgagaaaaccttcagcaaggatgaggagcttagaaaagagcagagaactcaccaggaaaagaaagtttattggtgtaatcagtgtagtaggaccttccagggcagctcagatctcatcagacatcaggtaactcatacaagagagaaaccatatgaatgtaaagaatgtgggaaaactcaatcagagctcagaccttctgagacatcatag

SEQ ID NO: 585 - DNA, 1593 bp, human
atgactcgcgatttcaaacctggagacctcatcttcgccaagatgaaaggttatccccattggccagctcgagtagacgaagttcctgatggagctgtaaagccacccacaaacaaactacccattttcttttttggaactcatgagactgcttttttaggaccaaaggatatatttccttactcagaaaataaggaaaagtatggcaaaccaaataaaagaaaaggttttaatgaaggtttatgggagatagataacaatccaaaagtgaaattttcaagtcaacaggcagcaactaaacaatcaaatgcatcatctgatgttgaagttgaagaaaaggaaactagtgtttcaaaggaagataccgaccatgaagaaaaagccagcaatgaggatgtgactaaagcagttgacataactactccaaaagctgccagaagggggagaaagagaaaggcagaaaaacaagtagaaactgaggaggcaggagtagtgacaacagcaacagcatctgttaatctaaaagtgagtcctaaaagaggacgacctgcagctacagaagtcaagattccaaaaccaagaggcagacccaaaatggtaaaacagccctgtccttcagagagtgacatcattactgaagaggacaaaagtaagaaaaaggggcaagaggaaaaacaacctaaaaagcagcctaagaaggatgaagagggccagaaggaagaagataagccaagaaaagagccggataaaaaagaggggaagaaagaagttgaatcaaaaaggaaaaatttagctaaaacaggggttacttcaacctccgattctgaagaagaaggagatgatcaagaaggtgaaaagaagagaaaaggtgggaggaactttcagactgctcacagaaggaatatgctgaaaggccaacatgagaaagaagcagcagatcgaaaacgcaagcaagaggaacaaatggaaactgagcagcagaataaagatgaaggaaagaagccagaagttaagaaagtggagaagaagcgagaaacatcaatggattctcgacttcaaaggatacatgctgagattaaaaattcactcaaaattgataatcttgatgtgaacagatgcattgaggccttggatgaacttgcttcacttcaggtcacaatgcaacaagctcagaaacacacagagatgattactacactgaaaaaaatacggcgattcaaagttagtcaggtaatcatggaaaagtctacaatgttgtataacaagtttaagaacatgttcttggttggtgaaggagattccgtgatcacccaagtgctgaataaatctcttgctgaacaaagacagcatgaggaagcgaataaaaccaaagatcaagggaagaaagggccaaacaaaaagctagagaaggaacaaacagggtcaaagactctaaatggaggatctgatgctcaagatggtaatcagccacaacataacggggagagcaatgaagacagcaaagacaaccatgaagccagcacgaagaaaaagccatccagtgaagagagagagactgaaatatctctgaaggattctacactagataactag

SEQ ID NO: 586 - DNA, 1335 bp, human
atgagggaaatcgtgcacatccaggctggtcagtgtggcaaccagatcggtgccaagttctgggaggtgatcagtgatgaacatggcatcgaccccaccggcacctaccacggggacagcgacctgcagctggaccgcatctctgtgtactacaatgaagccacaggtggcaaatatgttcctcgtgccatcctggtggatctagaacctgggaccatggactctgttcgctcaggtccttttggccagatctttagaccagacaactttgtatttggtcagtctggggcaggtaacaactgggccaaaggccactacacagagggcgccgagctggttgattctgtcctggatgtggtacggaaggaggcagagagctgtgactgcctgcagggcttccagctgacccactcactgggcgggggcacaggctctggaatgggcactctccttatcagcaagatccgagaagaataccctgatcgcatcatgaataccttcagtgtggtgccttcacccaaagtgtctgacaccgtggtcgagccctacaatgccaccctctccgtccatcagttggtagagaatactgatgagacctattgcattgacaacgaggccctctatgatatctgcttccgcactctgaagctgaccacaccaacctacggggatctgaaccaccttgtctcagccaccatgagtggtgtcaccacctgcctccgtttccctggccagctcaatgctgacctccgcaagttggcagtcaacatggtccccttcccacgtctccatttctttatgcctggctttgcccctctcaccagccgtggaagccagcagtatcgagctctcacagtgccggaactcacccagcaggtcttcgatgccaagaacatgatggctgcctgtgacccccgccacggccgatacctcaccgtggctgctgtcttccgtggtcggatgtccatgaaggaggtcgatgagcagatgcttaacgtgcagaacaagaacagcagctactttgtggaatggatccccaacaatgtcaagacagccgtctgtgacatcccacctcgtggcctcaagatggcagtcaccttcattggcaatagcacagccatccaggagctcttcaagcgcatctcggagcagttcactgccatgttccgccggaaggccttcctccactggtacacaggcgagggcatggacgagatggagttcaccgaggctgagagcaacatgaacgacctcgtctctgagtatcagcagtaccaggatgccaccgcagaagaggaggaggatttcggtgaggaggccgaagaggaggcctaa

SEQ ID NO: 587 - DNA, 4833 bp, human
atgaaaaaggaaggctcttcaggttccttcagactccagccgaatacaggttctctctcacgtgctgtaagttggataaatttctcctccttgtccaggcagacaaagaggctgtttcgcagtgatggagagctctcggtttgtgggcagcaggtggaagtggatgacgaaaactggatatacagagcccagcccagaaaagcggtttccaacctagatgaggaaagccgatggacagtccactacactgccccgtggcaccagcaggagaatgtgttccttcccaccacaagacccccctgtgttgaggacctgcaccgccaagccaagctcaacctcaaatcagtactgagggaatgcgataagttgcggcatgatggctaccgcagttctcagtactactctcagggacccacctttgcggccaacgccagcccattctgtgatgattaccaagatgaagatgaagaaacagatcaaaagtgttctctgtcttcatcagaagaagaaagatttatttccatcaggagacctaaaacaccagcctcaagtgacttctccgaccttaatactcagacgaactggaccaagtcgcttccactgccaacaccagaagagaagatgcgacagcaagcccaaacagtccaggctgacgtggtgcctattaacataactgcatcaggcactggccaagatgatgctgatggccactcagtgtacacccctgatcactactctacactaggaaggttcaatagctgtcggtctgctgggcagcgctcagaaaccagggactccagctgtcagacggaggatgtgaaggtcgtaccaccttccatgaggagaatcagggcacagaaggggcaaggcattgctgcccagatgggccacttctcaggttcctctggcaacatgtctgtgctgagcgattctgcagggatcgtattcccttcccgccttgacagtgatgctggcttccatagtcttccgcgttctggagcaagggcaaacattcagtcccttgagccgaggctgggtgccctcggccctgcaggagacatgaatggcactttcctctaccagagaggtcacccacaagcagatgaaaacttaggccatttaggaggtgcctcagggactggaacacttttgagacccaaatcccaggagttgagacacttcgagagtgaaaatataatgagcccagcgtgtgtggtttctcctcatgcaacctactccaccagcatcatcccaaatgccacactgtcttcctcttccgaggtcatcgctattcccactgctcagagtgcgggacagcgggaaagtaaaagttctggctcatcacatgcaaggataaaatccagagaccacctcatctccaggcatgctgtgaaaggtgatcctcagtctcccggtcgccactggaatgagggccatgccaccattctttcacaggacttagaccctcattcccctggtgaacccgcactgttgtccctctgtgactcagccgtccctctaaatgctccagcaaatagggagaatgggtcccaagctatgccgtataattgtagaaacaacctggccttcccagcccacccccaagatgtggatggcaagagtgaatctagttattcagggggcggagggcacagcagctcggagccctgggaatacaaatcctcaggtaatggaagggcatcccccctgaagccgcatttagcaactcctggctattccactcccacaagtaacatgagcagctgcagtttggaccaaacgtccaacaaagaggatgctgggtcgctgtattctgaggaccacgatggctactgtgcatctgtgcacactgactctggacatggatctgggaatctgtgcaatagcagtgatggctttgggaaccccaggcacagcgtgatcaatgtttttgttggaagagctcagaaaaaccaaggggaccggtccaattaccaggataaatccctatcaagaaacatctctttgaagaaagcaaagaagcctcccctgccaccctcccggacagactccctccgcaggattcccaagaagagcagccagtgcaacgggcaggtgctcaacgagagcctgatcgccacactccagcactcgctgcagctgagcctcccaggcaagagtggcagctcgccctcccagagcccctgcagtgacttggaagagccctggctgccccgctcccggagccagagcacagttagtgctggcagcagcatgacttccgccaccacccccaatgtctactccctgtgcggggccacgccatcgcagagtgacacaagcagcgtcaagtcagagtacacggacccctggggttattacattgactacacgggcatgcaggaagatccggggaacccggcagggggctgttcaaccagcagtggggtgcccactgggaacgggccagtccgccatgtccaagaagggtccagagccacaatgccccaagtgcccggtggttcagtcaaaccaaagatcatgtcaccagagaagtcacacagagtcatttctccatccagtgggtattccagccagtcgaatacacccacagcactcacccctgtgcctgtgtttttaaaatcagtgtcaccagcaaacgggaaggggaagcccaagcccaaggtaccagaaaggaagtcctctctgatatcttcagtatccatttcctcatcgtccacttctctttcttctagtacttctactgaaggaagtggcactatgaagaagctggatccagccgtgggctctcccccggctcctcctcctcctcctgttccctctcctccattcccttgtcctgcagacaggtctcctttccttcctcccccacctcctgtcacagattgctcccagggctctcctctgcctcactctcctgtgttcccccctccgccgccagaagctctcattcctttctgctccccacctgattggtgcctttctcctccccgccctgcactgagccccattcttccagattcacctgtgtccttgccattgcccccacctctcttaccttcctcggaacccccacctgccccacctcttgaccccaaattcatgaaagacaccaggccgcctttcacaaattctggccagccagaatcctcccggggatccttgaggccgccttctaccaaggaggagaccagcaggccccccatgcccctgataaccacggaagcattgcagatggtgcagttgaggcccgtgagaaagaactcaggcgctgaggcggcacagttgtctgaacgaacagctcaggaacaacgaactccagttgctccacagtaccacttaaagccatctgctttcctgaaatcccgaaatagcacaaatgaaatggagagtgaaagccagcctgcctctgtgacaagctcgcttccgacgcctgccaagagctcgagtcagggtgaccatggcagtgcggctgagcgtggtggccctgtgagccgcagccctggagctccaagcgctggggaggcagaggctcggcccagccccagcaccaccccactcccagactcttcacccagcaggaagccaccccccatttccaagaagcccaaactgttcctggtggtaccacctccgcagaaagattttgcagtggagcccgcagagaacgtgagcgaagccctccgagctgtgcccagccccacgacgggagaggagggctctgtgcacagcagggaggcaaaagagagttctgcagcccaagctggctctcatgccacgcaccctggcacctcggttcttgagggaggagctgcaggatccatgtctcccagcagagtggaagccaatgtccccatggttcagcctgatgtctcaccagcccccaagcaggaggagccagccgagaacagtgcggatactgggggcgatggggagagctgcctatctcaacaggacggagcagctggggtgccggagaccaacgcagccggttcatcctcagaggcctgtgacttcctcaaggaagacgggaatgatgaggtaatgacccccagtcgacccaggaccacagaagacctttttgcagctattcacagatccaaaaggaaagtcctcggccgtagagattcagatgatgaccactcccgaaaccattctccctccccgcccgtgacacccaccggcgctgccccaagcctggcctctccaaagcaagtggggtcgattcagagaagcatccgaaagagcagcaccagcagtgacaacttcaaagctctgctgctgaaaaagggcagtcgttcagacaccagcgcccgcatgtctgcagcagagatgctcaagaacacagaccctagattccagaggtcgaggtcagagccttccccagatgcccccgagagcccgtcaagctgctccccaagcaagaacagaagggcgcaggaggagtgggccaagaacgaaggcttgatgcctcggagtctgtccttttccggccccaggtacggccgcagccgaacgccgccttctgccgccagcagcaggtacagcatgcggaaccggatccagagcagccccatgaccgtcatctcggagggagaaggggaagccgtggagcctgtggacagcatagcccgcggggctctgggcgctgcggagggatgttccctggacggactggcgagggaggagatggacgagggcggcctgctctgtggggaggggcctgccgcctccctgcagccccaggcccccggccctgtggatgggacagccagtgcagagggcagagagccctccccacagtgtggcggttctctgagcgaggagagttag

SEQ ID NO: 588 - DNA, 555 bp, human
atgaaacctgatgaaactcctatgtttgacccaagtctactcaaagaagtggactggagtcagaatacagctacattttctccagccatttccccaacacatcctggagaaggcttggttttgaggcctctttgtactgctgacttaaatagaggtttttttaaggtattgggtcagctaacagagactggagttgtcagccctgaacaatttatgaaatcttttgagcatatgaagaaatctggggattattatgttacagttgtagaagatgtgactctaggacagattgttgctacggcaactctgattatagaacataaattcatccattcctgtgctaagagaggaagagtagaagatgttgttgttagtgatgaatgcagaggaaagcagcttggcaaattgttattatcaacccttactttgctaagcaagaaactgaactgttacaagattacccttgaatgtctaccacaaaatgttggtttctataaaaagtttggatatactgtatctgaagaaaactacatgtgtcggaggtttctaaagtaa

SEQ ID NO: 589 - DNA, 615 bp, human
atgggtgcatacaagtacatccaggagctatggagaaagaagcagtctgatgtcatgcgctttcttctgagggtccgctgctggcagtaccgccagctctctgctctccacagggctccccgccccacccggcctgataaagcgcgccgactgggctacaaggccaagcaaggttacgttatatataggattcgtgttcgccgtggtggccgaaaacgcccagttcctaagggtgcaacttacggcaagcctgtccatcatggtgttaaccagctaaagtttgctcgaagccttcagtccgttgcagaggagcgagctggacgccactgtggggctctgagagtcctgaattcttactgggttggtgaagattccacatacaaattttttgaggttatcctcattgatccattccataaagctatcagaagaaatcctgacacccagtggatcaccaaaccagtccacaagcacagggagatgcgtgggctgacatctgcaggccgaaagagccgtggccttggaaagggccacaagttccaccacactattggtggctctcgccgggcagcttggagaaggcgcaatactctccagctccaccgttaccgctaa

SEQ ID NO: 590 - DNA, 207 bp, human
atggtttattacccagaactctttgtctgggtcagtcaagaaccatttccaaacaaggacatggagggaaggcttcctaagggaagacttcctgtcccaaaggaagtgaaccgcaagaagaacgatgagacaaacgctgcctccctgactccactgggcagcagtgaactccgctccccaagaatcagttacctccactttttttaa

SEQ ID NO: 591 - DNA, 921 bp, human
atggcagcccccatacctcaagggttctcttgtttatcgagggttttgggctggtggtctcggcagccagttctggtgactcagtccgcagctatagttccagtaagaactaaaaaacgtttcacacctcctatttatcaacctaaatttaaaacagaaaaggagtttatgcaacatgcccggaaagcaggattggttattcctccagaaaaatcggaccgttccatacatctggcctgtacagctggtatatttgatgcctatgttcctcctgagggtgatgcacgcatatcatctctttcaaaggagggactgatagagagaactgaacgaatgaagaagactatggcatcacaagtgtcaatccggaggataaaagactatgatgccaactttaaaataaaggacttccctgaaaaagctaaggatatctttattgaagctcacctttgtctaaataactcagaccatgaccgacttcataccttggtaactgaacactgttttccagacatgacttgggacatcaaatataagaccgtccgctggagctttgtggaatctttagagccctctcatgttgttcaagttcgctgttcaagtatgatgaaccagggcaacgtgtacggccagatcaccgtacgcatgcacacccggcagactctggccatctatgaccggtttggccggttgatgtatggacaggaagatgtacccaaggatgtcctggagtatgttgtattcgaaaagcagttgacaaacccctatggaagctggagaatgcataccaagatcgttcccccatgggcaccccctaagcagcccatccttaagacggtgatgatccctggccctcagctgaaaccagaagaagaatatgaagaggcacaaggagaggcccagaagcctcagctagcctga

SEQ ID NO: 592 - DNA, 1395 bp, human
atggagtttgggctgacctgggttttccttgttgccgttataaaaggtgtccactgtctggcggttctggaggaatctgggggacgcctggtcaagccgggagggtccctgagactctcctgttcagtctctggattgaccttcagtgattattatatgacctggatacgccagtctccagcaaaggggctggagtggattgcacacatgagtaaaactggcacttccctttattattcagactctgtccggggccgcttcaccatctccagggacaacggccgatcgtctctgtatctccaaatggacaacttgacagccgacgacacggccgtctattattgtgcggccggagtggctcttgactactggggccagggaaccctggtcaccgtctcctcagcctccaccaagggcccatcggtcttccccctggcaccctcctccaagagcacctctgggggcacagcggccctgggctgcctggtcaaggactacttccccgaaccggtgacggtgtcgtggaactcaggcgccctgaccagcggcgtgcacaccttcccggctgtcctacagtcctcaggactctactccctcagcagcgtggtgaccgtgccctccagcagcttgggcacccagacctacatctgcaacgtgaatcacaagcccagcaacaccaaggtggacaagagagttgagcccaaatcttgtgacaaaactcacacatgcccaccgtgcccagcacctgaactcctggggggaccgtcagtcttcctcttccccccaaaacccaaggacaccctcatgatctcccggacccctgaggtcacatgcgtggtggtggacgtgagccacgaagaccctgaggtcaagttcaactggtacgtggacggcgtggaggtgcataatgccaagacaaagccgcgggaggagcagtacaacagcacgtaccgtgtggtcagcgtcctcaccgtcctgcaccaggactggctgaatggcaaggagtacaagtgcaaggtctccaacaaagccctcccagcccccatcgagaaaaccatctccaaagccaaagggcagccccgagaaccacaggtgtacaccctgcccccatcccgggaggagatgaccaagaaccaggtcagcctgacctgcctggtcaaaggcttctatcccagcgacatcgccgtggagtgggagagcaatgggcagccggagaacaactacaagaccacgcctcccgtgctggactccgacggctccttcttcctctatagcaagctcaccgtggacaagagcaggtggcagcaggggaacgtcttctcatgctccgtgatgcatgaggctctgcacaaccactacacgcagaagagcctctccctgtccccgggtaaatga

SEQ ID NO: 593 - DNA, 1425 bp, human
atggagtttgggcttagctgggttttccttgttgctattttaaaaggtgtccaatgtgaggtgcagctggtggagtctgggggaggcttggcagagccagggcggtccctgagactcgcctgtacagcttctggattcacctttgggaattatgctataacctggtttcgccaggccccagggaagggactggagtgggtagctttcatcaggagcaagatttatcatgcggcatcagaccatgccgcgtctgtgaaaggcagattcaccatctccagagatgattccaacggtgtcgcctatttacaaatgaacagcctacaaaccgaggacaccgccgtctattactgtagtcgagccgccctttatgactacggggactacggggactttgactactggggccacggaaccctggtcaccgtctcctcagcctccaccaagggcccatcggtcttccccctggcaccctcctccaagagcacctctgggggcacagcggccctgggctgcctggtcaaggactacttccccgaaccggtgacggtgtcgtggaactcaggcgccctgaccagcggcgtgcacaccttcccggctgtcctacagtcctcaggactctactccctcagcagcgtggtgaccgtgccctccagcagcttgggcacccagacctacatctgcaacgtgaatcacaagcccagcaacaccaaggtggacaagaaagttgagcccaaatcttgtgacaaaactcacacatgcccaccgtgcccagcacctgaactcctggggggaccgtcagtcttcctcttccccccaaaacccaaggacaccctcatgatctcccggacccctgaggtcacatgcgtggtggtggacgtgagccacgaagaccctgaggtcaagttcaactggtacgtggacggcgtggaggtgcataatgccaagacaaagccgcgggaggagcagtacaacagcacgtaccgtgtggtcagcgtcctcaccgtcctgcaccaggactggctgaatggcaaggagtacaagtgcaaggtctccaacaaagccctcccagcccccatcgagaaaaccatctccaaagccaaagggcagccccgagaaccacaggtgtacaccctgcccccatcccgggatgagctgaccaagaaccaggtcagcctgacctgcctggtcaaaggcttctatcccagcgacatcgccgtggagtgggagagcaatgggcagccggagaacaactacaagaccacgcctcccgtgctggactccgacggctccttcttcctctacagcaagctcaccgtggacaagagcaggtggcagcaggggaacgtcttctcatgctccgtgatgcatgaggctctgcacaaccactacacgcagaagagcctctccctgtctccgggtaaatga

SEQ ID NO: 594 - DNA, 3602 bp, human
atgaaggttgcaggaggacttgaacttggagctgctgctctgctctcagcatcaccacgtgctcttgtcactctttccacaggtcctacttgctctatattaccaaagaatccacttttcccccaaaacctgagctctcagccttgtatcaagatggaaggagacaaatcgctcaccttttccagctacgggctgcaatggtgtctctatgagctagacaaggaagaatttcagacattcaaggaattactaaagaagaaatcttcagaatcgaccacatgctctattccacagtttgaaatcgagaatgccaacgtggaatgtctggcactcctcttgcatgagtattatggagcatcgctggcctgggctacgtccattagcatctttgaaaacatgaacctgcgaaccctctcggagaaggcacgggatgacatgaaaagacattcaccagaagatcctgaagcaacgatgactgaccaaggaccaagcaaggaaaaagtgccaggaatttcacaagctgtgcaacaagatagtgccacagctgcagagacaaaagaacaagaaatttcacaagctatggaacaagaaggtgccacagcagcagagacagaagaacaagaaatttcacaagctatggaacaagaaggtgccacagcagcagagacagaagaacaaggacatggaggtgacacatgggactacaagagtcacgtgatgaccaaattcgctgaggaggaggatgtacgtcgtagttttgaaaacactgctgctgactggccggaaatgcaaacgttggctggtgcttttgattcagaccggtggggcttccggcctcgcacggtggttctgcacggaaagtcaggaattgggaaatcggctctagccagaaggatcgtgctgtgctgggcgcaaggtggactctaccagggaatgttctcctacgtcttcttcctccccgttagagagatgcagcggaagaaggagagcagtgtcacagagttcatctccagggagtggccagactcccaggctccggtgacggagatcatgtcccgaccagaaaggctgttgttcatcattgacggtttcgatgacctgggctctgtcctcaacaatgacacaaagctctgcaaagactgggctgagaagcagcctccgttcaccctcatacgcagtctgctgaggaaggtcctgctccctgagtccttcctgatcgtcaccgtcagagacgtgggcacagagaagctcaagtcagaggtcgtgtctccccgttacctgttagttagaggaatctccggggaacaaagaatccacttgctccttgagcgcgggattggtgagcatcagaagacacaagggttgcgtgcgatcatgaacaaccgtgagctgctcgaccagtgccaggtgcccgccgtgggctctctcatctgcgtggccctgcagctgcaggacgtggtgggggagagcgtcgcccccttcaaccaaacgctcacaggcctgcacgccgcttttgtgtttcatcagctcacccctcgaggcgtggtccggcgctgtctcaatctggaggaaagagttgtcctgaagcgcttctgccgtatggctgtggagggagtgtggaataggaagtcagtgtttgacggtgacgacctcatggttcaaggactcggggagtctgagctccgtgctctgtttcacatgaacatccttctcccagacagccactgtgaggagtactacaccttcttccacctcagtctccaggacttctgtgccgccttgtactacgtgttagagggcctggaaatcgagccagctctctgccctctgtacgttgagaagacaaagaggtccatggagcttaaacaggcaggcttccatatccactcgctttggatgaagcgtttcttgtttggcctcgtgagcgaagacgtaaggaggccactggaggtcctgctgggctgtcccgttcccctgggggtgaagcagaagcttctgcactgggtctctctgttgggtcagcagcctaatgccaccaccccaggagacaccctggacgccttccactgtcttttcgagactcaagacaaagagtttgttcgcttggcattaaacagcttccaagaagtgtggcttccgattaaccagaacctggacttgatagcatcttccttctgcctccagcactgtccgtatttgcggaaaattcgggtggatgtcaaagggatcttcccaagagatgagtccgctgaggcatgtcctgtggtccctctatggatgcgggataagaccctcattgaggagcagtgggaagatttctgctccatgcttggcacccacccacacctgcggcagctggacctgggcagcagcatcctgacagagcgggccatgaagaccctgtgtgccaagctgaggcatcccacctgcaagatacagaccctgatgtttagaaatgcacagattacccctggtgtgcagcacctctggagaatcgtcatggccaaccgtaacctaagatccctcaacttgggaggcacccacctgaaggaagaggatgtaaggatggcgtgtgaagccttaaaacacccaaaatgtttgttggagtctttgaggctggattgctgtggattgacccatgcctgttacctgaagatctcccaaatccttacgacctcccccagcctgaaatctctgagcctggcaggaaacaaggtgacagaccagggagtaatgcctctcagtgatgccttgagagtctcccagtgcgccctgcagaagctgatactggaggactgtggcatcacagccacgggttgccagagtctggcctcagccctcgtcagcaaccggagcttgacacacctgtgcctatccaacaacagcctggggaacgaaggtgtaaatctactgtgtcgatccatgaggcttccccactgtagtctgcagaggctgatgctgaatcagtgccacctggacacggctggctgtggttttcttgcacttgcgcttatgggtaactcatggctgacgcacctgagccttagcatgaaccctgtggaagacaatggcgtgaagcttctgtgcgaggtcatgagagaaccatcttgtcatctccaggacctggagttggtaaagtgtcatctcaccgccgcgtgctgtgagagtctgtcctgtgtgatctcgaggagcagacacctgaagagcctggatctcacggacaatgccctgggtgacggtggggttgctgcgctgtgcgagggactgaagcaaaagaacagtgttctggcgagactcgggttgaaggcatgtggactgacttctgattgctgtgaggcactctccttggccctttcctgcaaccggcatctgaccagtctaaacctggtgcagaataacttcagtcccaaaggaatgatgaagctgtgttcggcctttgcctgtcccacgtctaacttacagataattgggctgtggaaatggcagtaccctgtgcaaataaggaagctgctggaggaagtgcagctactcaagccccgagtcgtaattgacggtagttggcattcttttgatgaagatgaccggtactggtggaaaaactg

SEQ ID NO: 595 - DNA, 1386 bp, human
atggcggaggtgggggagataatcgagggctgccgcctacccgtgctgcggcggaaccaggacaacgaagatgagtggcccctggccgagatcctgagcgtgaaggacatcagtggccggaagcttttctacgtccattacattgacttcaacaaacgtctggatgaatgggtgacgcatgagcggctggacctaaagaagatccagttccccaagaaagaggccaagacccccactaagaacggacttcctgggtcccgtcctggctctccagagagagaggtgaaacggaaggtggaggtggtttcaccagcaactccagtgcccagcgagacagccccggcctcggtttttccccagaatggagccgcccgtagggcagtggcagcccagccaggacggaagcgaaaatcgaattgtttgggcactgatgaggactcccaggacagctctgatggaataccgtcagcaccacgcatgactggcagcctggtgtctgatcgaagccacgacgacatcgtcacccggatgaagaacattgagtgcattgagctgggccggcaccgcctcaagccgtggtacttctccccgtacccacaggaactcaccacattgcctgtcctctacctgtgcgagttctgcctcaagtacggccgtagtctcaagtgtcttcagcgtcatttgaccaagtgtgacctacgacatcctccaggcaatgagatttaccgcaagggcaccatctccttctttgagattgatggacgtaagaacaagagttattcccagaacctgtgtcttttggccaagtgtttccttgaccataagacactgtactatgacacagaccctttcctcttctacgtcatgacagagtatgactgtaagggcttccacatcgtgggctacttctccaaggagaaagaatcaacggaagactacaatgtggcctgcatcctaaccctgcctccctaccagcgccggggctacggcaagctgctgatcgagttcagctatgaactctccaaagtggaagggaaaacagggacccctgagaagcccctctcagaccttggcctcctatcctatcgaagctactggtcccagaccatcctggagatcctgatggggctgaagtcggagagcggggagaggccacagatcaccatcaatgagattagtgaaatcaccagcatcaagaaggaggatgtcatctccactctgcagtacctcaatctcatcaactactacaagggccagtacatcctcacactgtcagaggacatcgtggatggccatgagcgggccatgctcaagcggctcctgcggatcgactccaagtgtctgcacttcactcccaaggactggagcaagagggggaagtggtga

SEQ ID NO: 596 - DNA, 753 bp, human
atggctgtgtgcggcctggggagccgtcttggcctggggagccgtcttggcctgcgcgggtgcttcggcgccgccaggctcctgtatccccgtttccagagccgcggccctcagggcgtggaagacggggacaggccacagccttcctcgaagacacccaggatccccaagatttacaccaaaacgggagacaaagggttttctagtaccttcacaggagaaaggagacccaaagatgaccaagtgtttgaagccgtgggaactacagatgaattaagttcagctattgggtttgctctggaattagtcacagaaaagggccatacatttgccgaagagcttcagaaaatccagtgcacattgcaggacgtcggctcggccctggcgacaccatgctcctcggcccgggaggctcacttaaagtataccacgttcaaggcggggcccatcctggagctggagcagtggatcgacaagtacaccagccagctcccaccactcacggccttcatcctgccttcgggaggcaagatcagctcggcgctgcatttctgccgggccgtgtgccgccgggccgagagacgtgtggtgcctcttgtccagatgggagagaccgatgcgaacgtggccaagttcttaaacagactcagtgactatctcttcacgctagccagatatgcagccatgaaggaggggaatcaagagaaaatatacatgaaaaatgacccatcggccgagtctgagggactctga

SEQ ID NO: 597 - DNA, 1569 bp, human
atgagcgggtttaattttggaggcactggggcccctacaggcgggttcacgtttggcactgcaaagacggcaacaaccacacctgctacagggttttctttctccacctctggcactggagggtttaattttggggctcccttccaaccagccacaagtaccccttccaccggcctgttctcacttgccacccagactccggccacacagacgacaggcttcacttttggaacagcgactcttgcttcggggggaactggattttctttggggatcggtgcttcaaagctcaacttgagcaacacagctgccaccccagccatggcaaaccccagcggctttgggctgggcagcagcaacctcactaatgccatatcgagcaccgtcacctccagccagggcacagcacccaccggctttgtgtttggcccctccaccacctctgtggctccagctaccacatctggaggcttctcattcactggtggaagcacggcccaaccctccggtttcaacattggctcagcagggaattcagcccagcccacggcacctgccacgttgcccttcactccggccacgccagcagccaccacagcaggtgccacacagccagctgctcccacacccacagccaccatcaccagcactgggcccagcctctttgcgtcaatagcaactgctccaacctcatctgccaccactggactctccctctgtacccctgtgaccacagcgggcgcccccactgctgggacacagggcttcagcttaaaggcacctggagcagcttccggcacctccacaacaacatccaccgctgccaccgccaccgccaccaccaccagcagcagcagcaccaccggctttgccttgaatttaaaaccactggcgccagccgggatccccagcaatacagcagctgccgtgaccgctccacctggccctggcgcagctgcaggggcggctgccagctccgccatgacctacgcgcagctggagagcctgatcaacaaatggagcctggagctagaggaccaggagcggcacttcctccagcaggccacccaggtcaacgcctgggaccgcacgctgatcgagaatggagaaaagatcaccagcctgcaccgcgaggtggagaaggtgaagctggaccagaagaggctggaccaggagctcgacttcatcctgtcccagcagaaggagctggaagacctgctgagcccactggaggagttggtcaaggagcagagcgggaccatctacctgcagcacgcggatgaggagcgtgagaaaacctacaagctggctgagaacatcgatgcacagctcaagcgcatggcccaggatctcaaggacatcatcgagcacctgaacacgtccggggcccccgccgacaccagtgacccactgcagcagatctgcaagatcctcaatgcgcacatggactcactgcagtggatcgaccagaactcggccctgctgcagaggaaggtggaggaggtgaccaaggtgtgcgagggccggcgcaaggagcaggagcgcagcttccggatcacctttgactga

SEQ ID NO: 598 - DNA, 1992 bp, human
atggcggggatgaagacagcctccggggactacatcgactcgtcatgggagctgcgggtgtttgtgggagaggaggacccagaggccgagtcggtcaccctgcgggtcactggggagtcgcacatcggcggggtgctcctgaagattgtggagcagatcaatcgcaagcaggactggtcagaccatgctatttggtgggaacagaagaggcagtggctgctgcagacccactggacactggacaagtacgggatcctggccgacgcacgcctcttctttgggccccagcaccggcccgtcatccttcggttgcccaaccgccgcgcactgcgcctccgtgccagcttctcccagcccctcttccaggctgtggctgccatctgccgcctcctcagcatccggcaccccgaggagctgtccctgctccgggctcctgagaagaaggagaagaagaagaaagagaaggagccagaggaagagctctatgacttgagcaaggttgtcttggctgggggcgtggcacctgcactgttccgggggatgccagctcacttctcggacagcgcccagactgaggcctgctaccacatgctgagccggccccagccgccacccgaccccctcctgctccagcgtctgccacggcccagctccctgtcagacaagacccagctccacagcaggtggctggactcgtcgcggtgtctcatgcagcagggcatcaaggccggggacgcactctggctgcgcttcaagtactacagcttcttcgatttggatcccaagacagaccccgtgcggctgacacagctgtatgagcaggcccggtgggacctgctgctggaggagattgactgcaccgaggaggagatgatggtgtttgccgccctgcagtaccacatcaacaagctgtcccagagcggggaggtgggggagccggctggcacagacccagggctggacgacctggatgtggccctgagcaacctggaggtgaagctggaggggtcggcgcccacagatgtgctggacagcctcaccaccatcccagagctcaaggaccatctccgaatctttcggccccggaagctgaccctgaagggctaccgccaacactgggtggtgttcaaggagaccacactgtcctactacaagagccaggacgaggcccctggggaccccattcagcagctcaacctcaagggctgtgaggtggttcccgatgttaacgtctccggccagaagttctgcattaaactcctagtgccctcccctgagggcatgagtgagatctacctgcggtgccaggatgagcagcagtatgcccgctggatggctggctgccgcctggcctccaaaggccgcaccatggccgacagcagctacaccagcgaggtgcaggccatcctggccttcctcagcctgcagcgcacgggcagtgggggcccgggcaaccacccccacggccctgatgcctctgccgagggcctcaacccctacggcctcgttgccccccgtttccagcgaaagttcaaggccaagcagctcaccccacggatcctggaagcccaccagaatgtggcccagttgtcgctggcagaggcccagctgcgcttcatccaggcctggcagtccctgcccgacttcggcatctcctatgtcatggtcaggttcaagggcagcaggaaagacgagatcctgggcatcgccaacaaccgactgatccgcatcgacttggccgtgggcgacgtggtcaagacctggcgtttcagcaacatgcgccagtggaatgtcaactgggacatccggcaggtggccatcgagtttgatgaacacatcaatgtggccttcagctgcgtgtctgccagctgccgaattgtacacgagtatatcgggggctacattttcctgtcgacgcgggagcgggcccgtggggaggagctggatgaagacctcttcctgcagctcaccgggggccatgaggccttctga

SEQ ID NO: 599 - DNA, 798 bp, human
atgaaggttcttttactgaaggatgcgaaggaagatgactgtggccaggatccgtatatcagggaattaggattatatggacttgaagccactttgatccctgttttatcgtttgagtttttgtctcttcccagtttctctgagaagctttctcatcctgaagattacgggggactcatttttaccagccccagagcagtggaagcagcagagttatgtttggagcaaaacaataaaactgaagtctgggaaaggtctctgaaagaaaaatggaatgccaagtcagtgtatgtggttggaaatgctactgcttctctagtgagtaaaattggcctggatacagaaggagaaacctgtggaaatgcagaaaagcttgcagaatatatttgttccagggagtcctcagcactgcctcttctatttccctgtggaaacctcaaaagagaaatcctgccaaaagcgctcaaggacaaagggattgccatggaaagcataactgtgtatcagacagttgcacacccaggaatccaagggaacctgaacagctactattcccagcagggggttccagccagcatcacattttttagtccctctggcctcacatacagtctcaagcacattcaggagttatctggtgacaatatcgatcaaattaagtttgcagccatcggccccactacggctcgcgcgctggccgcccagggccttcctgtaagctgcactgcagagagccccacgccacaagccctggccactggcatcaggaaggctctccagccccatggctgctgctga

SEQ ID NO: 600 - DNA, 1932 bp, human
atggtagatgcaggtggagttgagaacatcacccagcttccccaggagcttcctcagatgatggctgcagcagccgatggtttggggagtatagcgatagacacgacccagctcaacatgtccgtgacagatcccacagcctgggctacagccatgaataacctgggcatggttcccgtagggttgcctggacagcagctcgtgtctgactcaatctgtgtcccaggctttgatccaagcctcaacatgatgactggaatcacccccattaacccaatgataccaggccttggactggtacctcccccaccaccaacagaagtggctgttgtcaaagaaataatccactgcaaaagctgtactctttttcctcaaaatccaaatcttccacctccttccacaagagaacgacctcctgggtgtaagaccgtgtttgtcggaggattaccagaaaatgctactgaggaaattattcaagaagtctttgaacagtgcggtgatattacagcaattcggaaaagcaagaagaatttttgtcacattcgctttgcagaggaattcatggttgataaagccatttacctttctggttataggatgcgattagggtctagcaccgacaaaaaggattcaggccgccttcatgtggactttgcccaggccagggatgacttctatgagtgggaatgcaagcagaggatgcgtgcccgggaggagcggcaccggcgcaagctggaggaggaccggctcaggcccccatccccgcctgccataatgcactactcggagcacgaagccgctctgctggctgaaaagctgaaagatgatagcaagttttcagaggctatcacagtgctgctttcctggattgaacgaggggaagtgaatcggcgctctgcaaaccagttctattccatggtgcagtcggccaacagccacgtccgccggctaatgaatgaaaaagccacccatgagcaagagatggaggaagccaaggagaattttaaaaatgccttaactgggattctcactcaatttgagcagattgtggccgttttcaacgcttctaccagacaaaaagcttgggaccatttctcgaaagcccagcgcaagaacatagacatttggcgaaagcattctgaggagctccggaatgctcaaagtgagcagctcatgggcatccgccgcgaagaagaaatggaaatgtctgatgatgagaactgtgacagccctacaaagaaaatgagagtcgatgaatcagccctggctgcccaggcctacgctctgaaagaggagaatgacagtctccgctggcagctggatgcctacaggaatgaggtggagctgctgaaacaagaaaaagaacagcttttccgaacagaagaaaacctcaccaaggaccagcaactgcagtttctgcagcaaaccatgcaaggcatgcagcagcaattgctaaccatccaggaggagttaaacaacaaaaagtcagaattggaacaagcaaaggaagagcagtcccatacacaagcgttactaaaagtcctgcaggaacaattaaaaggtaccaaggaattggtcgagaccaatggccacagccatgaggattcaaatgaaatcaatgtgttgacagttgcattagtcaaccaagaccgagagaacaatattgagaaaagaagccaaggcttaaaatcagagaaagaagctctgctaataggtatcatatcaacgtttcttcacgtccatccttttggagccaacatagaatatctttggtcatacatgcagcagctggactccaagatatctgcaaatgaaatagaaatgcttttgatgaggctgccacgcatgttcaaacaggaattcacgggtgtgggagccacgctggaaaaaagatggaagctgtgtgcctttgaaggaattaaaactacctaa

SEQ ID NO: 601 - DNA, 1266 bp, human
atgccgttcctgcacggcttccggaggatcatcttcgagtaccagccgctggtggatgcgattctgggctccctggggatccaggaccccgagcggcaggagtctctggaccggcccagttatgtcgccagcgaggagagccgaatccttgttctcactgagctgctggagaggaaagcccactctcccttttaccaggaaggcgtgagcaacgccctgctcaagatggctgagctggggctgacgcgggcggccgacgttctcttgcggcatggggccaatctcaactttgaagacccagtcacctactacacggccttgcacatcgccgtcctgcggaaccagccggacatggtggagctgctggtgcatcacggggccgacgttaatcggagggaccggatccacgagagtagccccttggacctggccagcgaggagcctgagcgcctgccctgcctgcagcgcctcctggaccttggagctgatgtcaatgccgctgacaagcatggaaaaactgctctgctccatgctctggccagcagcgacggggtgcagatccacaatactgagaacattcgtctcttactggaaggaggggcagacgtcaaggccaccaccaaagatggggacacagtgttcacctgcatcatcttcctgcttggtgagaccgtgggaggggacaaagaggaggcccagatgatcaaccgcttctgcttccaagtcacacggctgctgctggcacacggggccgaccccagcgagtgcccagcccacgagtccctcacccacatctgcctgaagagctttaaactgcacttccctctcctgcgcttcctcctggagtccggagccgcctacaactgctccctgcacggtgcgtcctgctggtctggctttcacatcatctttgagaggctctgttcccacccaggctgcacggaagacgagagccatgcggacctcctgcgcaaagctgagactgtcctggatctcatggtgaccaactctcagaaactccagctgcccgaaaacttcgatatccaccctgtgggcagcctggcggaaaagatccaggccctccacttctccttgaggcagctggagagctatcccccgcccctcaagcacctgtgccgtgtggccatccggctctaccttcagccgtggcctgtggatgtgaaggtcaaagccctgcctctgcccgacaggctgaagtggtacctccttagcgagcacagtggctccgtggaagatgacatctga

SEQ ID NO: 602 - DNA, 1140 bp, human
atgtcgcgcagtggaaccgatcctcagcaacgccagcaggcgtcagaggcggacgccgcagcagcaaccttccgggcaaacgaccatcagcatatccgctacaacccgctgcaggatgagtgggtgctggtgtcagctcaccgcatgaagcggccctggcagggtcaagtggagccccagcttctgaagacagtgccccgccatgaccctctcaaccctctgtgtcctggggccatccgagccaacggagaggtgaatccccagtacgatagcaccttcctgtttgacaacgacttcccagctctgcagcctgatgcccccagtccaggacccagtgatcatccccttttccaagcaaagtctgctcgaggagtctgtaaggtcatgtgcttccacccctggtcggatgtaacgctgccactcatgtcggtccctgagatccgggctgttgttgatgcatgggcctcagtcacagaggagctgggtgcccagtacccttgggtgcagatctttgaaaacaaaggtgccatgatgggctgttctaacccccacccccactgccaggtatgggccagcagtttcctgccagatattgcccagcgtgaggagcgatctcagcaggcctataagagtcagcatggagagcccctgctaatggagtacagccgccaggagctactcaggaaggaacgtctggtcctaaccagtgagcactggttagtactggtccccttctgggcaacatggccctaccagacactgctgctgccccgtcggcatgtgcggcggctacctgagctgacccctgctgagcgtgatgatctagcctccatcatgaagaagctcttgaccaagtatgacaacctctttgagacgtcctttccctactccatgggctggcatggggctcccacaggatcagaggctggggccaactggaaccattggcagctgcacgctcattactaccctccgctcctgcgctctgccactgtccggaaattcatggttggctacgaaatgcttgctcaggctcagagggacctcacccctgagcaggctgcagagagactaagggcacttcctgaggttcattaccacctggggcagaaggacagggagacagcaaccatcgcctga

SEQ ID NO: 603 - DNA, 831 bp, human
atggacgccgacagcctcctgctgtctctggagctggcgtccggcagtgggcagggcctcagcccggaccgtcgggcctcgctgctcacgtctcttatgctggttaagcgcgactaccgctatgatcgggttctcttctggggccgcatccttggcctcgtcgccgattactacatcgcgcagggcctgagtgaggaccagctcgcaccgcgcaagacgctctatagcctgaactgcacagagtggagcctcttgccccctgccacagaggagatggtggcgcagtcgtctgtggtgaagggccgcttcatgggggacccatcatacgaatatgaacacactgagctgcagaaggtgaatgaaggtgaaaaagtctttgaagaagaaatagtggtccagatcaaggaagagacccgcttggtgtctgtcattgaccagattgacaaggctgtggccatcatcccccgaggcgccctcttcaagaccccttttggacccacccatgtcaatcggacctttgaaggactgtccttgtctgaggccaagaagctcagctcctacttccatttcagggagcctgttgagctaaagaataagaccttgcttgagaaggctgacctggacccctccctggatttcatggactccttggagcatgacattcccaaagggtcctggagcatccagatggagaggggcaatgccctggtggtgctgcgcagcctgctctggccgggcctcaccttctaccatgctccccgcaccaagaactatggctacgtctacgtgggcactggcgagaagaacatggacttgcccttcatgctatag

SEQ ID NO: 604 - DNA, 1596 bp, human
atggacggcattgtcccagatatagccgttggtacaaagcggggatctgacgagcttttctctacttgtgtcactaacggaccgtttatcatgagcagcaactcggcttctgcagcaaacggaaatgacagcaagaagttcaaaggtgacagccgaagtgcaggcgtcccctctagagtgatccacatccggaagctccccatcgacgtcacggagggggaagtcatctccctggggctgccctttgggaaggtcaccaacctcctgatgctgaaggggaaaaaccaggccttcatcgagatgaacacggaggaggctgccaacaccatggtgaactactacacctcggtgacccctgtgctgcgcggccagcccatctacatccagttctccaaccacaaggagctgaagaccgacagctctcccaaccaggcgcgggcccaggcggccctgcaggcggtgaactcggtccagtcggggaacctggccttggctgcctcggcggcggccgtggacgcagggatggcgatggccgggcagagccccgtgctcaggatcatcgtggagaacctcttctaccctgtgaccctggatgtgctgcaccagattttctccaagttcggcacagtgttgaagatcatcaccttcaccaagaacaaccagttccaggccctgctgcagtatgcggaccccgtgagcgcccagcacgccaagctgtcgctggacgggcagaacatctacaacgcctgctgcacgctgcgcatcgacttttccaagctcaccagcctcaacgtcaagtacaacaatgacaagagccgtgactacacacgcccagacctgccttccggggacagccagccctcgctggaccagaccatggccgcggccttcggcctttccgttccgaacgtccacggcgccctggcccccctggccatcccctcggcggcggcggcagctgcggcggcaggtcggatcgccatcccgggcctggcgggggcaggaaattctgtattgctggtcagcaacctcaacccagagagagtcacaccccaaagcctctttattcttttcggcgtctacggtgacgtgcagcgcgtgaagatcctgttcaataagaaggagaacgccctagtgcagatggcggacggcaaccaggcccagctggccatgagccacctgaacgggcacaagctgcacgggaagcccatccgcatcacgctctcgaagcaccagaacgtgcagctgccccgcgagggccaggaggaccagggcctgaccaaggactacggcaactcacccctgcaccgcttcaagaagccgggctccaagaacttccagaacatattcccgccctcggccacgctgcacctctccaacatcccgccctcagtctccgaggaggatctcaaggtcctgttttccagcaatgggggcgtcgtcaaaggattcaagttcttccagaaggaccgcaagatggcactgatccagatgggctccgtggaggaggcggtccaggccctcattgacctgcacaaccacgacctcggggagaaccaccacctgcgggtctccttctccaagtccaccatctag

SEQ ID NO: 605 - DNA, 1056 bp, human
atgctggagacccttcgcgagcggctgctgagcgtgcagcaggatttcacctccgggctgaagactttaagtgacaagtcaagagaagcaaaagtgaaaagcaaacccaggactgttccatttttgccaaagtactctgctggattagaattacttagcaggtatgaggatacatgggctgcacttcacagaagagccaaagactgtgcaagtgctggagagctggtggatagcgaggtggtcatgctttctgcgcactgggagaagaaaaagacaagcctcgtggagctgcaagagcagctccagcagctcccagctttaatcgcagacttagaatccatgacagcaaatctgactcatttagaggcgagttttgaggaggtagagaacaacctgctgcatctggaagacttatgtgggcagtgtgaattagaaagatgcaaacatatgcagtcccagcaactggagaattacaagaaaaataagaggaaggaacttgaaaccttcaaagctgaactagatgcagagcacgcccagaaggtcctggaaatggagcacacccagcaaatgaagctgaaggagcggcagaagttttttgaggaagccttccagcaggacatggagcagtacctgtccactggctacctgcagattgcagagcggcgagagcccataggcagcatgtcatccatggaagtgaacgtggacatgctggagcagatggacctgatggacatatcggaccaggaggccctggacgtcttcctgaactctggaggagaagagaacactgtgctgtcccccgccttagggcctgaatccagtacctgtcagaatgagattaccctccaggttccaaatccctcagaattaagagccaagccaccttcttcttcctccacctgcaccgactcggccacccgggacatcagtgagggtggggagtcccccgttgttcagtccgatgaggaggaagttcaggtggacactgccctggccacatcacacactgacagagaggccactccggatggtggtgaggacagcgactcttaa

SEQ ID NO: 606 - DNA, 687 bp, human
atggcttcagaagagctacagaaagatctagaagaggtaaaggtgttgctggaaaaggctactaggaaaagagtacgtgatgcccttacagctgaaaaatccaagattgagacagaaatcaagaacaagatgcaacagaaatcacagaagaaagcagaacttcttgataatgaaaaaccagctgctgtggttgctcccattacaacgggctatacggtgaaaatcagtaattatggatgggatcagtcagataagtttgtgaaaatctacattaccttaactggagttcatcaagttcccactgagaatgtgcaggtgcatttcacagagaggtcatttgatcttttggtaaagaatctaaatgggaagagttactccatgattgtgaacaatctcttgaaacccatctctgtggaaggcagttcaaaaaaagtcaagactgatacagttcttatattgtgtagaaagaaagtggaaaacacaaggtgggattacctgacccaggttgaaaaggagtgcaaagaaaaagagaagccctcctatgacactgaaacagatcctagtgagggattgatgaatgttctaaagaaaatttatgaagatggagacgatgatatgaagcgaaccattaataaagcctgggtggaatcaagagagaagcaagccaaaggagacacggaattttga

SEQ ID NO: 607 - DNA, 1809 bp, human
atgccctcggccaaacaaaggggctccaagggcggccacggcgccgcgagcccctcggagaagggtgcccacccgtcgggcggcgcggatgacgtggcgaagaagccgccgccggcgccgcagcagccgccgccgccgcccgcgccgcacccgcagcagcacccgcagcagcacccgcagaaccaggcgcacggcaagggcggccaccgcggcggcggcggcggcggcggcaagtcctcctcctcctcctccgcctccgccgccgctgccgccgccgccgcctcgtcctcggcgtcctgctcgcgcaggctcggcagggcgctcaactttctcttctacctcgccctggtggcggcggccgctttctcgggctggtgcgtccaccacgtcctggaggaggtccagcaggtccggcgcagccaccaggacttctcccggcagagggaggagctgggccagggcttgcagggcgtcgagcagaaggtgcagtctttgcaagccacatttggaacttttgagtccatcttgagaagctcccaacataaacaagacctcacagagaaagctgtgaagcaaggggagagtgaggtcagccggatcagcgaagtgctgcagaaactccagaatgagattctcaaagacctctcggatgggatccatgtggtgaaggacgcccgggagcgggacttcacgtccctggagaacacggtggaggagcggctgacggagctcaccaaatccatcaacgacaacatcgccatcttcacagaagtccagaagaggagccagaaggagatcaatgacatgaaggcaaaggttgcctccctggaagaatctgaggggaacaagcaggatttgaaagccttaaaggaagctgtgaaggagatacagacctcagccaagtccagagagtgggacatggaggccctgagaagtacccttcagactatggagtctgacatctacaccgaggtccgcgagctggtgagcctcaagcaggagcagcaggctttcaaggaggcggccgacacggagcggctcgccctgcaggccctcacggagaagcttctcaggtctgaggagtccgtctcccgcctcccggaggagatccggagactggaggaagagctccgccagctgaagtccgattcccacgggccgaaggaggacggaggcttcagacactcggaagcctttgaggcactccagcaaaagagtcagggactggactccaggctccagcacgtggaggatggggtgctctccatgcaggtggcttctgcgcgccagaccgagagcctggagtccctcctgtccaagagccaggagcacgagcagcgcctggccgccctgcaggggcgcctggaaggcctcgggtcctcagaggcagaccaggatggcctggccagcacggtgaggagcctgggcgagacccagctggtgctctacggtgacgtggaggagctgaagaggagtgtgggcgagctccccagcaccgtggaatcactccagaaggtgcaggagcaggtgcacacgctgctcagtcaggaccaagcccaggccgcccgtctgcctcctcaggacttcctggacagactttcttctctagacaacctgaaagcctcagtcagccaagtggaggcggacttgaaaatgctcaggactgctgtggacagtttggttgcatactcggtcaaaatagaaaccaacgagaacaatctggaatcagccaagggtttactagatgacctgaggaatgatctggataggttgtttgtgaaagtggagaagattcacgaaaaggtctaa

SEQ ID NO: 608 - DNA, 468 bp, human
atggcgtcgctcaaatgtagcaccgtcgtctgcgtgatctgcttggagaagcccaaataccgctgtccagcctgccgcgtgccctactgctcggtagtctgcttccggaagcacaaagaacagtgcaaccctgaaactcgtcctgttgagaaaaaaataagatcagctcttcctaccaaaaccgtaaagcctgtggaaaacaaagatgatgatgactctatagctgattttctcaatagtgatgaggaagaagacagagtttctttgcagaatttaaagaatttaggggaatctgcaacattaagaagcttattgctcaatccacacctcaggcagttgatggtcaacctcgatcagggagaagacaaagcaaagctcatgagagcttacatgcaagagcctttgtttgtggagtttgcagactgctgtttaggaattgtggagccatcccagaatgaggagtcttaa

SEQ ID NO: 609 - DNA, 3339 bp, human
atggccctcaagatggtgaagggcagcatcgaccgcatgttcgacaagaatctgcaggacttggtccgcggcatccgtaaccacaaggaggacgaggcaaaatacatatctcagtgcattgatgagatcaagcaggagctgaagcaggacaacatagcggtgaaggcgaacgcggtctgcaagctgacgtatttacagatgttgggatacgacatcagctgggccgccttcaacatcatagaagtgatgagtgcctccaagttcaccttcaagcgaattggctacctcgctgcttcccagagctttcacgaaggcaccgacgtcatcatgctgaccaccaatcagatccgtaaggacttgagcagccccagccagtacgacacaggtgttgcactgacgggtctgtcctgcttcgtcaccccagaccttgccagagacctggcaaatgacatcatgacactgatgtcacacaccaagccctacatcaggaagaaggctaagctgatcgagcccctcaccaatctcatccacagcacgtctgccatgtctctcctctatgaatgtgtgaacaccgtgattgcagtgctcatctcgctgtcctccggcatgcccaaccacagcgccagcatccagctttgtgttcagaaattaaggatattgatcgaggactccgatcagaacttgaagtacctggggctgctggcaatgtccaagatcctgaagacccaccccaagtccgtgcagtcccacaaggacctcatcctgcagtgcctggacgacaaggacgagtccatccggctgcgggccctggacctgctctatgggatggtgtccaagaagaacctgatggagatcgtgaagaagctgatgacccacgtagacaaggcagagggtaccacctaccgtgacgagctgctcaccaagatcattgacatctgcagccagtccaactaccagtacatcaccaacttcgagtggtacatcagcatcctggtggagctgacccggctggagggcacacggcacggccacctcatcgccgcccaaatgctggacgtggccatccgcgtgaaggccatccgcaagttcgccgtgtcccagatgtctgcgctgcttgacagtgcacacctgctggccagcagcacccagcggaacgggatctgtgaggtgctgtacgctgccgcctggatctgcggggagttctcagagcatctgcaggaaccacaccacactttggaggccatgctgcggcccagagtcaccacgctgccaggccacatccaggccgtgtatgtgcagaacgtggtcaagctctacgcctccatcctgcagcagaaggagcaggccggggaggcagagggcgctcaggccgtcacccagctcatggtggaccggctgccccagtttgtgcagagcgcagacctggaggtgcaggagcgggcgtcctgcatcctgcagctggtcaagcacatccagaagcttcaggccaaggacgtgcctgtggcagaggaggtcagcgctctctttgctggggagctgaacccagtggcccccaaggcccagaagaaggttccagtccccgaaggcctggacctggacgcctggatcaatgagccactctcggacagcgagtcagaggacgagaggcccagggccgtcttccacgaggaggagcagcggcgtcccaagcaccggccgtcggaggcggacgaggaagagctggctcggcgccgagaggcccggaagcaggagcaggccaacaaccccttctacatcaagagctcgccatcgccacagaagcggtaccaggacaccccgggcgtggagcacattcccgtggtgcagattgacctctccgtccccttgaaggttccagggctgcctatgtcagatcagtatgtgaagctggaggaggagcggcggcaccggcagaagctggagaaggacaagaggaggaaaaagaggaaggagaaggagaagaagggcaagcgccgccacagctcgctgcccacggagagcgacgaggacatcgcccctgcccagcaggtggacatcgtcacagaggagatgcctgagaatgctctgcccagcgacgaggatgacaaagaccccaacgacccctacagggctctggatattgacctggataagcccttagccgacagcgagaaactgcctattcagaaacacagaaacaccgagacctcaaaatcccctgagaaggacgttcccatggtagaaaagaagagcaagaaacccaagaagaaagagaaaaaacacaaagagaaagagagagacaaggagaagaagaaggagaaggagaagaaggctgaggacctggacttctggctgtctaccaccccaccgcctgcccccgcccccgcccccgcccccgttccatccacggacgagtgtgaggacgccaagacggaggcgcagggcgaggaggacgatgccgaggggcaagaccaggacaagaaatctcccaagcctaagaagaagaagcacaggaaggagaaggaggagcggaccaaaggcaagaagaagtccaagaagcagcctccaggcagcgaggaggcagcgggggagccggtgcagaatggcgcgccagaggaggagcagctcccgcctgagtccagctactccctcctcgctgaaaattcctatgttaaaatgacctgtgacatccggggcagtctgcaggaggacagccaggtcactgtggccatcgtgctggagaacaggagcagcagcatcctcaagggcatggagctcagcgtgctggactcactcaatgccaggatggcccggccgcagggctcctccgtccacgatggcgtccccgtgcctttccagctgcccccaggcgtctccaacgaagcccagtatgtgttcaccatccagagcatcgtcatggcgcagaagctcaaggggaccctgtccttcattgccaagaatgacgagggtgcgacccacgagaagctggacttcaggctgcacttcagctgcagctcctacttgatcaccactccctgctacagtgacgcctttgctaagttgctggagtctggggacttgagcatgagctcaatcaaagtcgatggcattcggatgtccttccagaatcttctggcgaagatctgttttcaccaccatttttccgttgtggagcgagtggactcctgcgcctccatgtacagccgctccatccagggccaccatgtctgcctcctggtgaaaaagggtgagaactctgtctcagtcgacgggaagtgcagtgactccacgctactgagcaacttgttagaagagatgaaggcgacgctggccaagtgttga

SEQ ID NO: 610 - DNA, 1848 bp, human
atgagggctctgctgctcctggggttcctgctggtgagcttggagtcaacactttcgattccaccttgggaagcccccaaggagcataagtacaaagctgaagagcacacagtcgttctcactgtcaccggggagccctgccacttccccttccagtaccaccggcagctgtaccacaaatgtacccacaagggccggccaggccctcagccctggtgtgctaccacccccaactttgatcaggaccagcgatggggatactgtttggagcccaagaaagtgaaagaccactgcagcaaacacagcccctgccagaaaggagggacctgtgtgaacatgccaagcggcccccactgtctctgtccacaacacctcactggaaaccactgccagaaagagaagtgctttgagcctcagcttctccggtttttccacaagaatgagatatggtatagaactgagcaagcagctgtggccagatgccagtgcaagggtcctgatgcccactgccagcggctggccagccaggcctgccgcaccaacccgtgcctccatgggggtcgctgcctagaggtggagggccaccgcctgtgccactgcccggtgggctacaccggagccttctgcgacgtggacaccaaggcaagctgctatgatggccgcgggctcagctaccgcggcctggccaggaccacgctctcgggtgcgccctgtcagccgtgggcctcggaggccacctaccggaacgtgactgccgagcaagcgcggaactggggactgggcggccacgccttctgccggaacccggacaacgacatccgcccgtggtgcttcgtgctgaaccgcgaccggctgagctgggagtactgcgacctggcacagtgccagaccccaacccaggcggcgcctccgaccccggtgtcccctaggcttcatgtcccactcatgcccgcgcagccggcaccgccgaagcctcagcccacgacccggaccccgcctcagtcccagaccccgggagccttgccggcgaagcgggagcagccgccttccctgaccaggaacggcccactgagctgcgggcagcggctccgcaagagtctgtcttcgatgacccgcgtcgttggcgggctggtggcgctacgcggggcgcacccctacatcgccgcgctgtactggggccacagtttctgcgccggcagcctcatcgccccctgctgggtgctgacggccgctcactgcctgcaggaccggcccgcacccgaggatctgacggtggtgctcggccaggaacgccgtaaccacagctgtgagccgtgccagacgttggccgtgcgctcctaccgcttgcacgaggccttctcgcccgtcagctaccagcacgacctggctctgttgcgccttcaggaggatgcggacggcagctgcgcgctcctgtcgccttacgttcagccggtgtgcctgccaagcggcgccgcgcgaccctccgagaccacgctctgccaggtggccggctggggccaccagttcgagggggcggaggaatatgccagcttcctgcaggaggcgcaggtaccgttcctctccctggagcgctgctcagccccggacgtgcacggatcctccatcctccccggcatgctctgcgcagggttcctcgagggcggcaccgatgcgtgccagggtgattccggaggcccgctggtgtgtgaggaccaagctgcagagcgccggctcaccctgcaaggcatcatcagctggggatcgggctgtggtgaccgcaacaagccaggcgtctacaccgatgtggcctactacctggcctggatccgggagcacaccgtttcctga

SEQ ID NO: 611 - DNA, 1089 bp, human
atggcccccaagccgggggccgagtggagcacagccctgtcccatctggtgctgggagtggtgtctctgcacgcagccgtgagcacagccgaggcaagtcgaggggctgctgctggcttcctgctccaggtcttggctgccaccaccacgctggccccagggctgagcacacacgaagactgccttgctggagcctgggtggccaccgtcatcggccttccccttctggccttcgatttccactggtgtactaatggtcacttgatgtgcgctggctgttttatccacctactagcagatgcccggctgaaggaggagcaggccacgtgccccaattgtcgttgtgagatcagtaagagcctctgctgccggaacctggccgtggagaaagccgtgagcgagctgccttcagagtgtggcttctgcctgcgccagtttccccgctccctcctggagaggcaccagaaagaggaatgccaggacagggtaacccagtgcaagtacaaacgcatcggctgcccatggcacggccccttccatgagctgacggtgcacgaggctgcgtgcgcccacccgaccaagacaggcagtgagctgatggagatcctggatgggatggaccagagccaccgcaaggagatgcagctgtacaacagcatcttcagcctgctcagcttcgagaagattggctacacagaggtccagttccggccgtaccgcacagacgacttcatcacgcgcctgtactatgagacgcccaggttcacagtgctgaaccagacgtgggtcctgaaggctcgagtcaacgactcggagcgtaaccccaacctgtcctgcaagcgtacgctctccttccagctcctcctcaagagcaaggtcacggcaccgctggagtgctccttcctgctgctcaagggcccctacgacgacgtgaggatcagccccgtcatctaccactttgtcttcaccaacgagagcaacgagacggactacgtgccactgcccatcattgactccgtggagtgcaacaagctgctggctgccaagaacatcaacctgcggctcttcctgttccagatacagaagtag

SEQ ID NO: 612 - DNA, 921 bp, human
atgtccttgaagcttcaggcaagcaatgtaaccaacaagaatgaccccaagtccatcaactctcgagtcttcattggaaacctcaacacagctctggtgaagaaatcagatgtggagaccatcttctctaagtatggccgtgtggccggctgttctgtgcacaagggctatgcctttgttcagtactccaatgagcgccatgcccgggcagctgtgctgggagagaatgggcgggtgctggccgggcagaccctggacatcaacatggctggagagcctaagcctgacagacccaaggggctaaagagagcagcatctgccatatacagtggctacatctttgactatgattactaccgggacgacttctacgacaggctcttcgactaccggggccgtctgtcgcccgtgccagtgcccagggcggtccctgtgaagcgaccccgggtcacagtccctttggtccggcgtgtcaaaactaacgtacctgtcaagctctttgcccgctccacagctgtcaccaccagctcagccaagatcaagttaaagagcagtgagctgcaggccatcaagacggagctgacacagatcaagtccaatatcgatgccctgctgagccgcttggagcagatcgctgcggagcaaaaggccaatccagatggcaagaagaagggtgatggaggtggcgccggcggcggcggcggtggtggtggcagcggtggcggtggcagtggtggtggcggtggcggtggcagcagccggccaccagccccccaagagaacacaacttctgaggcaggcctgccccagggggaagcacggacccgagacgacggcgatgaggaagggctcctgacacacagcgaggaagagctggaacacagccaggacacagacgcggatgatggggccttgcagtaa

SEQ ID NO: 613 - DNA, 3702 bp, human
atgtggctgagcccggaggaggtgctggtggccaatgcgctgtgggtgacggagcgggccaaccccttcttcgtgctgcagcgacgccggggccacggcaggggcggcggccttacgggtcttctcgtgggcaccctggacgtggtgctggactccagtgcccgcgtggccccttaccgcatcctgcaccagacccaggactcccaggtctactggacagtggcgtgtggttcttcccgcaaagagatcacaaaacactgggaatggctggaaaataacttgctccagacactgtccatcttcgacagtgaggaagatatcaccaccttcgtcaagggcaagatacacggaatcatcgcagaagagaacaagaacctgcagccccagggagacgaggaccccgggaagttcaaggaggctgagctgaagatgcggaagcagtttgggatgcctgagggcgagaagctggtgaattactactcctgcagctactggaagggccgcgtgccccggcagggctggctgtacctgacggtcaaccacctgtgcttctactccttcctgctggggaaggaagtgagcctcgtggtgcagtgggtggacataacgcgtctggagaagaacgccaccctgctcttccccgagagcatccgtgtggacacccgcgaccaggagctcttcttctccatgttcctcaacatcggcgagaccttcaagctcatggagcagttggccaacctggccatgcggcagctgctggacagcgagggcttcctggaggacaaggccctgcctaggcccatccggccacacaggaacatctcagccctgaagcgagacctggacgcccgagccaagaatgagtgctaccgagccacgttccggctgcccagggatgagcggctagacggccacacaagctgcaccctgtggacgccgttcaacaagctgcacatccctggccagatgttcatctccaacaactacatctgcttcgccagcaaggaggaggacgcttgccacctcatcatacccctgagggaggtgaccattgtcgaaaaagctgacagctccagcgtgctgcccagccccctgtccatcagcaccaaaagcaaaatgacattcctgtttgccaacctgaaagaccgtgatttcttggtgcagaggatctctgacttcctccagaaaacaccatccaagcagccaggcagtatcgggagcaggaaagccagtgttgtggaccctagcacagagtcttccccagctcctcaggaggggtcggagcagcccgccagcccagcctctcccctcagcagccgccagagcttctgtgcgcaggaggcgccaaccgcatcccagggcctgctgaagctcttccagaaaaactcgcccatggaggaccttggagccaagggggccaaggagaagatgaaagaggagtcatggcacatccacttcttcgagtacgggcgtggcgtgtgcatgtaccgcacagccaagacgcgggcactggtcctgaagggtatccctgagagcctccggggagagctgtggctcctcttctccggggcctggaatgagatggtgactcaccccgggtactatgctgagctggtggagaagtccaccgggaagtacagcctggccacagaggagatcgagcgagacctgcaccgctccatgcccgagcaccctgccttccagaacgagctggggattgctgccctccggcgggtgctgactgcctatgccttccgaaaccccaccatcggctactgccaggcaatgaacatcgtgacctcggtgctcctgctctatggcagtgaggaggaggccttctggctcctggtggccctgtgcgagcgcatgctgcccgactactacaacaccagggtggtgggagccctggtggaccaaggcatcttcgaagagctcacgagagacttcctgccgcagctctcggagaagatgcaggacctgggggtgatctccagcatctcgctgtcctggttcctgaccctcttcctcagcgtcatgcccttcgagagcgccgtggtcatcgtcgactgctttttctatgagggcatcaaggtgatcctgcaggtggccctggccgtcctggacgccaacatggagcagctgctgggctgcagcgacgagggcgaggccatgaccatgctgggcagatacctggataatgtggtcaacaagcagagtgtctctcctcctatcccgcacctccgtgccttgctgagcagcagcgatgacccccctgcagaggtggacatctttgagctcctgaaagtgtcctatgagaaattcagcagcctgagggccgaagacattgagcagatgcggtttaaacagaggctgaaagtgatccagtccttggaggacacggccaagaggagtgtggtccgagctatacctgtggacattggtttctccattgaagagctggaggacctttacatggtgtttaaggccaagcacctggctagccagtactgggggtgcagccgcacaatggccggccgtcgggaccccagcctgccctacctggagcagtaccggattgatgccagccagttccgggaactctttgccagcctgacaccctgggcctgtggctcccacacacctctgctggcagggcgcatgttcaggctcctggacgaaaacaaggactcgctgatcaacttcaaggagttcgtgacagggatgagcgggatgtaccacggggacctgacagagaagctcaaggtgctctacaagctacaccttcccccagctctgagcccagaggaagccgagtcagccctggaggcggcccattatttcacagaggacagctcctcagaagaagcactaccacaggaagagcaagaaggaagtggaagtgaggagagaggagaggagaaggggaccagctctccggactatcggcactaccttcgaatgtgggccaaggagaaagaggctcagaaggagacgattaaggatcttcccaagatgaaccaggagcagttcattgagctgtgcaagacgctttacaacatgttcagtgaagaccccatggagcaggacctgtaccacgccatcgccaccgtggccagcctcctgctccgcatcggagaggtggggaagaagttctcagcccgcacaggcaggaagcccagggactgtgccactgaggaggacgagccaccagcacccgaactgcatcaggacgcagccagggagcttcagcccccagctgcaggagacccccaagccaaagcaggcggagacacacacctcggaaaagccccacaggagagccaggtggtggtggaggggggcagcggcgagggacagggctcaccctcccagctgctgtctgacgatgaaaccaaagacgacatgtccatgtcctcctactcggtggtcagcacgggctccctgcaatgtgaagaccttgcagacgacacggtgctggtgggcggggaggcctgcagccccacagcgcgcatcggcggcaccgtcgacaccgactggtgcatctcctttgagcagatcctggcctccatcctgacggagtccgtgctggtgaacttctttgagaagagagtggacattggactcaagatcaaggaccaaaagaaagtggagagacagttcagcaccgccagtgaccatgagcagcctggagtttccggctga

SEQ ID NO: 614 - DNA, 3129 bp, human
atgcccatgtgggccggcggtgtggggagccctcggcggggcatggcccctgcgtccacagatgacctctttgcccgcaagctgcgccagccagcaaggcccccgctgacaccgcacaccttcgagccgaggccagtccggggcccactcctgcgcagcggcagcgatgcaggcgaggccaggccccccacgccagccagcccccgtgcccgtgcccacagccacgaagaggccagccgacctgcagccacttccacccggctcttcactgacccgctggcactgctggggctgccagcagaggaaccagagcctgccttcccaccagtgcttgagcctcgatggtttgcccactatgacgtgcaaagcctgctctttgattgggctccgaggtctcaggggatggggagccactcagaggccagctctgggaccctggcttcagccgaggaccaggctgccagctcggacctgctgcatggggcacctggctttgtgtgtgagctcgggggtgagggtgagctaggcctgggtggaccagcatccccacctgtgccccctgcactgcccaacgcggccgtgtccatcctggaggagccacagaaccgaacctcggcctacagcctggagcacgcagacctgggtgctggctactaccgcaaatacttctatggcaaagaacatcagaacttcttcgggatggacgagtcgctgggcccggtggcagtgagcctgcggcgggaggagaaggagggcagcggagggggcaccctgcacagctaccgcgtcatcgtgcggaccacgcagctccggacactccgtggcaccatctcggaggacgcgctgccgccggggcccccacggggtctgtccccaaggaaacttctggagcacgtggcgccgcagctgagccccagctgcctgcgcctgggctcagcttcacccaaggtaccacggacgctgctcacactggatgagcaagtgctgagcttccaacgcaaggtgggcatcctgtactgccgggcgggccagggctcggaggaggagatgtacaacaaccaggaggcgggaccggccttcatgcagtttctcaccttgctgggcgatgtggtgcggctcaaaggctttgagagttaccgggcccagctagacaccaaaacggattccacaggcacgcactccctctacaccacataccaggaccacgagatcatgttccacgtgtccacgatgctgccttacacccctaataaccagcagcagctcctccggaagcgccacattggcaacgacattgtgaccatcgtgttccaggagcctggcagcaagcccttctgccccaccaccatccgctcgcacttccagcacgtgttcctagtggtgcgggcacacacaccctgcacgccacacaccacctacagggtggccgtgagccgcacccaggacacccctgccttcgggccagctctgcctgctggcggaggccccttcgcagccaacgccgacttccgggccttcctgctggccaaagcgctgaatggtgagcaggcggccggccacgcgcgccagttccacgccatggccacgcgcacccgccagcagtacctgcaagacctggccaccaacgaggtgaccactacgtcgctggactcggcttcacgcttcggcctgccctccctgggtgggaggcgccgggcggcccctcggggcccaggcgccgagctgcaggcagcgggctcactggtgtggggagtgcgcgcggcgcccggggcgcgggtcgccgccggggctcaggcgagcggccccgaaggcatcgaggtgccctgcctgctgggcatctcggccgaggctctggtgctggtggcgccgcgcgacggccgcgtagtgttcaattgcgcctgtcgcgacgtgctggcctggaccttctccgagcagcagctggacctgtaccacggccgcggggaggcgatcacgctgcgcttcgacgggtcccccggccaagccgtgggcgaggtggtggcgcgcctgcagctggtgagccgtggctgcgagacccgcgagctggcgctgccccgcgacggtcaaggccgcctgggcttcgaggtggacgccgagggattcgtcacgcacgtggagcgcttcacattcgccgagacggcggggctgcggcccggggcgcgcctcctgcgcgtgtgcggccagacgctgcccagcctccggcccgaggccgctgcccagctcctgcgctcggcgcccaaggtctgcgtcaccgtcctgccccccgacgagagcggccggccccgcaggagtttttcggagctgtacacgctgtcgctgcaggagcctagccggcggggggccccagatcctgtgcaggatgaggtccagggggtgaccctgctgcccaccacaaagcagctgctgcacctgtgcctgcaagatggtggcagtcctccagggcctggggatctggccgaggagaggactgagttcctgcacagccagaactcgctgtcaccacgcagctctctgtcggatgaggccccagtcctgcccaacaccaccccggacctcctcctggccaccacagccaagccatcagtacccagtgctgacagtgagacacccctgacccaggacaggccaggcagtcccagtggctctgaggacaagggcaacccggcgccggagctgagggcctcctttctgccacgtaccttgtctctgcggaactccatcagcaggatcatgtcggaggcgggcagtgggaccctggaggacgagtggcaggccatctcggagattgcctctacttgcaacaccattctggagtcgctgtcccgagagggacagcccatcccagagagtggagaccctaagggaactccaaaatctgatgctgagccagagcctgggaacctctcagagaaggtctctcacttggagtccatgctcaggaagctgcaggaggacctgcagaaggagaaggcggacagggcggccctggaggaggaggtgcggagcctgagacacaacaaccggcggctgcaggcggagtctgagagtgcagccacacgcctcctcctggcctccaagcagctgggctcacccaccgccgacctggcctga

SEQ ID NO: 615 - DNA, 1755 bp, human
atgaagatgatgctggtgcgccggttccgcgtgctcatcctgatggtgttcctggtggcctgcgcgctgcacatcgccctggacctgctgcccaggctggagcgacgcggcgcgcggccctcgggggagcccggctgttcgtgcgcgcagcccgccgccgaggtggccgcgcccggctgggcccaggttcggggccgccccggggagcccccggccgcctcctccgccgccggcgacgcgggctggcccaacaagcacacgctccgcatcctgcaggacttcagctccgacccctcctccaacctctcgtcccactcgctggagaaactgccgcccgcggccgagccggccgagcgcgccttgcgggggcgggatcccggcgccctaagaccccacgaccccgcgcaccggccgctgctgcgagaccccggcccgcgtcggtccgagtcgccccccggccccggcggagacgcctccctcctggccaggctgttcgagcacccgctttaccgggtggcggttccgccgctcacggaggaggacgtcctgttcaatgtgaacagcgacaccaggctcagccccaaagcggcggagaacccggactggccgcatgcgggtgctgaaggtgcagaattcctctcccccggggaggcggccgtggactcctatcccaactggctcaagttccacattggtatcaaccggtacgagctgtactccagacacaacccggccatcgaggccctgctgcacgacctcagctcccagaggatcaccagcgtggccatgaagtcggggggcacgcagctgaagctcatcatgaccttccagaattacgggcaagcgctgttcaaacccatgaaacaaacgagggagcaggagacaccccctgactttttttatttctctgactacgagaggcacaatgcggagattgctgccttccacctggacaggatcctggacttccgccgggtccctcccgtggccggcaggatggtcaacatgaccaaggagatccgggacgtcacacgggacaagaagctctggaggaccttcttcatctctccagccaacaacatctgcttctacggcgagtgttcctactactgctccacggagcacgccctgtgcgggaagccagaccagatcgagggctcgctggcggccttcctgcccgacctgtccctggccaagaggaagacctggcggaacccttggcggcgttcctaccacaagcgcaagaaggccgagtgggaggtggaccctgactactgcgaggaggtgaagcagacaccgccctacgacagcagccaccgcatcctggacgtcatggacatgacgatcttcgacttcctcatgggaaacatggaccgtcaccactacgagacttttgagaagtttgggaatgaaacgttcatcatccacttagacaatggaagagggtttgggaagtattcgcacgacgagctctccatcctggtgccgctacagcagtgctgcaggatccggaagtccacctacctgcgtctgcagctcctggccaaggaggagtacaagctgagcctgctgatggccgagtctctgcggggggaccaggtggcacccgtgctgtaccagccgcacctggaggccctggaccggcggctccgcgtcgtgctaaaggccgtccgggactgcgtggagaggaacgggctccacagcgtggtggatgacgacctggacactgagcacagagccgcctcggcgaggtag

SEQ ID NO: 616 - DNA, 2337 bp, human
atggatgaaatgacagctgtggtgaaaattgaaaaaggagttggtggcaataatgggggcaatggtaatggtggtggtgccttttcacaggctcgaagtagcagcacaggcagtagcagcagcactggaggaggagggcaggagtcccagccatcccctttggctctgctggcagcaacttgcagcagaattgagtcacccaatgagaacagcaacaactcccagggcccgagtcagtcagggggaacaggtgagcttgacctcacagccacacaactttcacagggtgccaatggctggcagatcatctcttcctcctctggggctacccctacctcaaaggaacagagtggcagcagtaccaatggcagcaatggcagtgagtcttccaagaatcgcacagtctctggtgggcagtatgttgtggctgccgctcccaacttacagaaccagcaagttctgacaggactacctggagtgatgcctaatattcagtatcaagtaatcccacagttccagaccgttgatgggcaacagctgcagtttgctgccactggggcccaagtgcagcaggatggttctggtcaaatacagatcataccaggtgcaaaccaacagattatcacaaatcgaggaagtggaggcaacatcattgctgctatgccaaacctactccagcaggctgtccccctccaaggcctggctaataatgtactctcaggacagactcagtatgtgaccaatgtaccagtggccctgaatgggaacatcaccttgctacctgtcaacagcgtttctgcagctaccttgactcccagctctcaggcagtcacgatcagcagctctgggtcccaggagagtggctcacagcctgtcacctcagggactaccatcagttctgccagcttggtatcatcacaagccagttccagctcctttttcaccaatgccaatagctactcaactactactaccaccagcaacatgggaattatgaactttactaccagtggatcatcagggaccaactctcaaggccagacaccccagagggtcagtgggctacaggggtctgatgctctgaacatccagcaaaaccagacatctggaggctcattgcaagcaggccagcaaaaagaaggagagcaaaaccagcagacacagcagcaacaaattcttatccagcctcagctagttcaagggggacaggccctccaggccctccaagcagcaccattgtcagggcagacctttacaactcaagccatctcccaggaaaccctccagaacctccagcttcaggctgttccaaactctggtcccatcatcatccggacaccaacagtggggcccaatggacaggtcagttggcagactctacagctgcagaacctccaagttcagaacccacaagcccaaacaatcaccttagccccaatgcagggtgtttccttggggcagaccagcagcagcaacaccactctcacacccattgcctcagctgcttccattcctgctggcacagtcactgtgaatgctgctcaactctcctccatgccaggcctccagaccattaacctcagtgcattgggtacttcaggaatccaggtgcacccaattcaaggcctgccgttggctatagcaaatgccccaggtgatcatggagctcagcttggtctccatggggctggtggtgatggaatacatgatgacacagcaggtggagaggaaggagaaaacagcccagatgcccaaccccaagccggtcggaggacccggcgggaagcatgcacctgcccctactgtaaagacagtgaaggaaggggctcgggggatcctggcaaaaagaaacagcatatttgccacatccaaggctgtgggaaagtgtatggcaagacctctcacctgcgggcacacttgcgctggcatacaggcgagaggccatttatgtgtacctggtcatactgtgggaaacgcttcacacgttcggatgagctacagaggcacaaacgtacacacacaggtgagaagaaatttgcctgccctgagtgtcctaagcgcttcatgaggagtgaccacctgtcaaaacatatcaagacccaccagaataagaagggaggcccaggtgtagctctgagtgtgggcactttgcccctggacagtggggcaggttcagaaggcagtggcactgccactccttcagcccttattaccaccaatatggtagccatggaggccatctgtccagagggcattgcccgtcttgccaacagtggcatcaacgtcatgcaggtggcagatctgcagtccattaatatcagtggcaatggcttctga

SEQ ID NO: 617 - DNA, 435 bp, human; identical to SEQ ID NO: 111

SEQ ID NO: 618 - DNA, 1896 bp, human
atgaatggtgattctcgtgctgcggtggtgacctcaccacccccgaccacagcccctcacaaggagaggtacttcgaccgagtagatgagaacaacccagagtacttgagggagaggaacatggcaccagaccttcgccaggacttcaacatgatggagcaaaagaagagggtgtccatgattctgcaaagccctgctttctgtgaagaattggaatcaatgatacaggagcaatttaagaaggggaagaaccccacaggcctattggcattacagcagattgcagattttatgaccacgaatgtaccaaatgtctacccagcagctccgcaaggagggatggctgccttaaacatgagtcttggtatggtgactcctgtgaacgatcttagaggatctgattctattgcgtatgacaaaggagagaagttattacggtgtaaattggcagcgttttatagactagcagatctctttgggtggtctcagcttatctacaatcatatcacaaccagagtgaactccgagcaggaacacttcctcattgtcccttttgggcttctttacagtgaagtgactgcatccagtttggttaagatcaatctacaaggagatatagtagatcgtggaagcactaatctgggagtgaatcaggccggcttcaccttacactctgcaatttatgctgcacgcccggacgtgaagtgcgtcgtgcacattcacaccccagcaggggctgcggtctctgcaatgaaatgtggcctcttgccaatctccccggaggcgctttcccttggagaagtggcttatcatgactaccatggcattctggttgatgaagaggaaaaagttttgattcagaaaaatctggggcctaaaagcaaggttcttattctccggaaccatgggctcgtgtcagttggagagagcgttgaggaggccttctattacatccataaccttgtggttgcctgtgagatccaggttcgaactctggccagtgcaggaggaccagacaacttagtcctgctgaatcctgagaagtacaaagccaagtcccgttccccagggtctccggtaggggaaggcactggatcgcctcccaagtggcagattggtgagcaggaatttgaagccctcatgcggatgctcgataatctgggctacagaactggctacccttatcgataccctgctctgagagagaagtctaaaaaatacagcgatgtggaggttcctgctagtgtcacaggttactcctttgctagtgacggtgattcgggcacttgctccccactcagacacagttttcagaagcagcagcgggagaagacaagatggctgaactctggccggggcgacgaagcttccgaggaagggcagaatggaagcagtcccaagtcgaagactaagtggactaaagaggatggacatagaacttccacctctgctgtccctaacctgtttgttccattgaacactaacccaaaagaggtccaggagatgaggaacaagatccgagagcagaatttacaggacattaagacggctggccctcagtcccaggttttgtgtggtgtagtgatggacaggagcctcgtccagggagagctggtgacggcctccaaggccatcattgaaaaggagtaccagccccacgtcattgtgagcaccacgggccccaaccccttcaccacactcacagaccgtgagctggaggagtaccgcagggaggtggagaggaagcagaagggctctgaagagaatctggacgaggctagagaacagaaagaaaagagtcctccagaccagcctgcggtcccccacccgcctcccagcactcccatcaagctggaggaaggagacggatgcgctagagagtacctgttaccctaa

SEQ ID NO: 619 - DNA, 990 bp, human
atggctgaggcaggaacaggtgagccgtcccccagcgtggagggcgaacacgggacggagtatgacacgctgccttccgacacagtctccctcagtgactcggactctgacctcagcttgcccggtggtgctgaagtggaagcactgtccccgatggggctgcctggggaggaggattcaggtcctgatgagccgccctcacccccgtcaggcctcctcccagccacggtgcagccattccatctgagaggcatgagctccaccttctcccagcgcagccgtgacatctttgactgcctggagggggcggccagacgggctccatcctctgtggcccacaccagcatgagtgacaacggaggcttcaagcggcccctagcgccctcaggccggtctccagtggaaggcctgggcagggcccatcggagccctgcctcaccaagggtgcctccggtccccgactacgtggcacaccccgagcgctggaccaagtacagcctggaagatgtgaccgaggtcagcgagcagagcaatcaggccaccgccctggccttcctgggctcccagagcctggctgcccccactgactgcgtgtcctccttcaaccaggatccctccagctgtggggaggggagggtcatcttcaccaaaccagtccgaggggtcgaagccagacacgagaggaagagggtcctggggaaggtgggagagccaggcaggggcggccttgggaatcctgccacagacaggggcgagggccctgtggagctggcccatctggccgggcccgggagcccagaggctgaggagtggggcagccaccatggaggcctgcaggaggtggaggcactgtcagggtctgtccacagtgggtctgtgccaggtctcccgccggtggaaactgttggcttccatggcagcaggaagcggagtcgagaccacttccggaacaagagcagcagccccgaggacccaggtgctgaggtctga

SEQ ID NO: 620 - DNA, 1086 bp, human
atggagtccatcttccacgagaaacaagaaggctcactttgtgctcaacattgcctgaataacttattgcaaggagaatattttagccctgtggaattatcctcaattgcacatcagctggatgaggaggagaggatgagaatggcagaaggaggagttactagtgaagattatcgcacgtttttacagcagccttctggaaatatggatgacagtggttttttctctattcaggttataagcaatgccttgaaagtttggggtttagaactaatcctgttcaacagtccagagtatcagaggctcaggatcgatcctataaatgaaagatcatttatatgcaattataaggaacactggtttacagttagaaaattaggaaaacagtggtttaacttgaattctctcttgacgggtccagaattaatatcagatacatatcttgcacttttcttggctcaattacaacaggaaggttattctatatttgtcgttaagggtgatctgccagattgcgaagctgaccaactcctgcagatgattagggtccaacagatgcatcgaccaaaacttattggagaagaattagcacaactaaaagagcaaagagtccataaaacagacctggaacgagtgttagaagcaaatgatggctcaggaatgttagacgaagatgaggaggatttgcagagggctctggcactaagtcgccaagaaattgacatggaagatgaggaagcagatctccgcagggctattcagctaagtatgcaaggtagttccagaaacatatctcaagatatgacacagacatcaggtacaaatcttacttcagaagagcttcggaagagacgagaagcctactttgaaaaacagcagcaaaagcagcaacagcagcagcagcagcagcagcagggggacctatcaggacagagttcacatccatgtgaaaggccagccaccagttcaggagcacttgggagtgatctaggtgatgctatgagtgaagaagacatgcttcaggcagctgtgaccatgtctttagaaactgtcagaaatgatttgaaaacagaaggaaaaaaataa

SEQ ID NO: 621 - DNA, 648 bp, human
atgagcagctcagaggaggtgtcctggatttcctggttctgtgggctccgtggcaatgaattcttctgtgaagtggatgaagactacatccaggacaaatttaatcttactggactcaatgagcaggtccctcactaccgacaagctctagacatgatcttggacctggagcctgatgaagaactggaagacaaccccaaccagagtgacctgattgagcaggcagccgagatgctttatggattgatccacgcccgctacatccttaccaaccgtggcatcgcccagatgttggaaaagtaccagcaaggagactttggttactgtcctcgtgtgtactgtgagaaccagccaatgcttcccattggcctttcagacatcccaggtgaagccatggtgaagctctactgccccaagtgcatggatgtgtacacacccaagtcatcaagacaccatcacacggatggcgcctacttcggcactggtttccctcacatgctcttcatggtgcatcccgagtaccggcccaagagacctgccaaccagtttgtgcccaggctctacggtttcaagatccatccgatggcctaccagctgcagctccaagccgccagcaacttcaagagcccagtcaagacgattcgctga

SEQ ID NO: 622 - DNA, 3720 bp, human
atgagccgcctgctctggaggaaggtggccggcgccaccgtcgggccagggccggttccagctccggggcgctgggtctccagctccgtccccgcgtccgaccccagcgacgggcagcggcggcggcagcagcagcagcagcagcagcagcagcagcaacagcagcctcagcagccgcaagtgctatcctcggagggcgggcagctgcggcacaacccattggacatccagatgctctcgagagggctgcacgagcaaatcttcgggcaaggaggggagatgcctggcgaggccgcggtgcgccgcagcgtcgagcacctgcagaagcacgggctctgggggcagccagccgtgcccttgcccgacgtggagctgcgcctgccgcccctctacggggacaacctggaccagcacttccgcctcctggcccagaagcagagcctgccctacctggaggcggccaacttgctgttgcaggcccagctgcccccgaagcccccggcttgggcctgggcggagggctggacccggtacggccccgagggggaggccgtacccgtggccatccccgaggagcgggccctggtgttcgacgtggaggtctgcttggcagagggaacttgccccacattggcggtggccatatccccctcggcctggtattcctggtgcagccagcggctggtggaagagcgttactcttggaccagccagctgtcgccggctgacctcatccccctggaggtccctactggtgccagcagccccacccagagagactggcaggagcagttagtggtggggcacaatgtttcctttgaccgagctcatatcagggagcagtacctgatccagggttcccgcatgcgtttcctggacaccatgagcatgcacatggccatctcagggctaagcagcttccagcgcagtctgtggatagcagccaagcagggcaaacacaaggtccagccccccacaaagcaaggccagaagtcccagaggaaagccagaagaggcccagcgatctcatcctgggactggctggacatcagcagtgtcaacagtctggcagaggtgcacagactttatgtaggggggcctcccttagagaaggagcctcgagaactgtttgtgaagggcaccatgaaggacattcgtgagaacttccaggacctgatgcagtactgtgcccaggacgtgtgggccacccatgaggttttccagcagcagctaccgctcttcttggagaggtgtccccacccagtgactctggccggcatgctggagatgggtgtctcctacctgcctgtcaaccagaactgggagcgttacctggcagaggcacagggcacttatgaggagctccagcgggagatgaagaagtcgttgatggatctggccaatgatgcctgccagctgctctcaggagagaggtacaaagaagacccctggctctgggacctggagtgggacctgcaagaatttaagcagaagaaagctaagaaggtgaagaaggaaccagccacagccagcaagttgcccatcgagggggctggggcccctggtgatcccatggatcaggaagacctcggcccctgcagtgaggaggaggagtttcaacaagatgtcatggcccgcgcctgcttgcagaagctgaaggggaccacagagctcctgcccaagcggccccagcaccttcctggacaccctggatggtaccggaagctctgcccccggctagacgaccctgcatggaccccgggccccagcctcctcagcctgcagatgcgggtcacacctaaactcatggcacttacctgggatggcttccctctgcactactcagagcgtcatggctggggctacttggtgcctgggcggcgggacaacctggccaagctgccgacaggtaccaccctggagtcagctggggtggtctgcccctacagagccatcgagtccctgtacaggaagcactgtctcgaacaggggaagcagcagctgatgccccaggaggccggcctggcggaggagttcctgctcactgacaatagtgccatatggcaaacggtagaagaactggattacttagaagtggaggctgaggccaagatggagaacttgcgagctgcagtgccaggtcaacccctagctctgactgcccgtggtggccccaaggacacccagcccagctatcaccatggcaatggaccttacaacgacgtggacatccctggctgctggtttttcaagctgcctcacaaggatggtaatagctgtaatgtgggaagcccctttgccaaggacttcctgcccaagatggaggatggcaccctgcaggctggcccaggaggtgccagtgggccccgtgctctggaaatcaacaaaatgatttctttctggaggaacgcccataaacgtatcagctcccagatggtggtgtggctgcccaggtcagctctgccccgtgctgtgatcaggcaccccgactatgatgaggaaggcctctatggggccatcctgccccaagtggtgactgccggcaccatcactcgccgggctgtggagcccacatggctcaccgccagcaatgcccggcctgaccgagtaggcagtgagttgaaagccatggtgcaggccccacctggctacacccttgtgggtgctgatgtggactcccaagagctgtggattgcagctgtgcttggagacgcccactttgccggcatgcatggctgcacagcctttgggtggatgacactgcagggcaggaagagcaggggcactgatctacacagtaagacagccactactgtgggcatcagccgtgagcatgccaaaatcttcaactacggccgcatctatggtgctgggcagccctttgctgagcgcttactaatgcagtttaaccaccggctcacacagcaggaggcagctgagaaggcccagcagatgtacgctgccaccaagggcctccgctggtatcggctgtcggatgagggcgagtggctggtgagggagttgaacctcccagtggacaggactgagggtggctggatttccctgcaggatctgcgcaaggtccagagagaaactgcaaggaagtcacagtggaagaagtgggaggtggttgctgaacgggcatggaaggggggcacagagtcagaaatgttcaataagcttgagagcattgctacgtctgacataccacgtaccccggtgctgggctgctgcatcagccgagccctggagccctcggctgtccaggaagagtttatgaccagccgtgtgaattgggtggtacagagctctgctgttgactacttacacctcatgcttgtggccatgaagtggctgtttgaagagtttgccatagatgggcgcttctgcatcagcatccatgacgaggttcgctacctggtgcgggaggaggaccgctaccgcgctgccctggccttgcagatcaccaacctcttgaccaggtgcatgtttgcctacaagctgggtctgaatgacttgccccagtcagtcgcctttttcagtgcagtcgatattgaccggtgcctcaggaaggaagtgaccatggattgtaaaaccccttccaacccaactgggatggaaaggagatacgggattccccagggtgaagcgctggatatttaccagataattgaactcaccaaaggctccttggaaaaacgaagccagcctggaccatag

SEQ ID NO: 623 - DNA, 2007 bp, human
atggcggccaacatgtaccgggtgggagattacgtctattttgagaactcttccagcaatccttacctggttagacggattgaggagctcaacaagactgcaaatggaaatgtggaggcaaaggttgtctgtcttttccggcgcagggacatttctagtagcctcaacagcctggctgatagtaatgccagggagtttgaagaggaatcaaagcagccaggggtgtctgagcagcagcgccatcaactgaagcaccgggaactttttctttctcggcaatttgaatcattaccagccacccacatacgggggaaatgcagtgtgaccctcttgaatgagacagatatcttgagccagtacctggaaaaggaggactgctttttttactcactggtgtttgaccccgtgcagaagacacttctcgctgatcagggcgagattagagttggttgcaaataccaagctgagatcccagatcgcctagtagagggagaatctgataatcggaaccagcagaagatggagatgaaggtctgggacccagacaaccctctcacagaccggcagatcgaccagtttcttgtggtggcccgagctgtgggaacctttgcaagagccctagattgtagcagctccattcggcagccaagcttgcacatgagtgcagctgctgcctcccgagatatcactctgtttcacgccatggataccttgcaaaggaacggctacgacctggctaaggccatgtcgaccctggtaccccagggaggcccggtgctgtgtcgggatgagatggaggaatggtcagcctcagaggccatgctatttgaggaggccctagagaagtatgggaaggacttcaatgatattcgccaggattttctaccctggaagtcacttgccagcatagtccagttttattacatgtggaaaaccacagaccggtatattcagcagaaaaggttgaaagctgctgaagcagacagcaaactgaaacaggtctacattcccacctacactaagccaaaccctaaccagatcatttctgtgggttcaaaacctggcatgaatggggctggatttcagaagggcctgacttgtgagagttgccacaccacacagtctgctcagtggtatgcctggggcccacctaacatgcagtgccgcctctgtgcttcctgttggatctactggaagaagtatgggggactgaagaccccaactcagcttgagggggccactcggggcaccacggagccacactcaaggggtcatttatccagacctgaagctcaaagtctctctccttacacaaccagcgccaacagggccaagctactggctaagaacagacaaactttcctgcttcagaccacaaagctgacccgtcttgccagacgcatgtgcagggacctattacagccaaggagggccgcccgacggccttatgctcctatcaatgccaatgccatcaaagcagagtgctccattcgacttcctaaggccgccaagactccattgaagattcaccctctggtgcggctgcccctggcaactatcgtcaaagatctggtggcccaggcacccctgaaaccaaaaacacctcggggtaccaagacaccgatcaacagaaaccagctgtcccagaaccggggactggggggcattatggtgaaacgggcctatgagactatggcaggggcaggggttcctttctctgccaatggaaggcctctggcttcagggattcgttcaagctcacagccagcagccaagcgtcagaaactaaacccagctgatgcccccaatcctgtggtgtttgtggccacaaaggataccagggccctacggaaggctctgacccatctggaaatgcggcgagctgctcgccgacccaacttgcccctgaaggtgaagccaacgctgattgcagtgcggccccctgtccctctacctgcaccctcacatcctgccagcaccaatgagcctattgtcctggaggactga

SEQ ID NO: 624 - DNA, 1323 bp, human
atgggcctgggcgtcagcgctgagcagcccgcaggcggcgccgagggcttccacctccacggggtgcaggagaactccccagcccagcaggcgggcctggagccctactttgacttcatcatcaccattgggcactcgaggctgaacaaggagaatgacaccctgaaggcactactgaaagccaatgtggagaagcccgtgaagctggaggtgttcaatatgaagaccatgagggtgcgcgaggtggaggtggtgcccagcaacatgtggggcggccagggcctactgggtgccagtgtgcgcttctgcagcttccgcagggccagtgagcaggtgtggcatgtgctggatgtggaaccatcttcacctgctgcccttgccggcctgcgcccctacacagactatgtggttggttcggaccagattctccaggagtccgaggacttctttacgctcatcgagtctcatgaggggaagcccttgaagctgatggtgtataactccaagtcagactcctgccgggaggtgactgtaactcccaacgcagcctggggtggagagggcagtctgggatgtggcattggctatgggtatctacaccggatcccaactcagccccccagctaccacaagaagccacctggcaccccaccaccttctgctctaccacttggtgccccaccacctgatgctctaccacctggacccacccccgaggactctccttccctggagacaggttccaggcagagtgactacatggaggccctgctgcaggcacctggctcctccatggaggatccccttcctgggcctgggagtcccagccacagtgctccagaccctgatggacttccccatttcatggagactcctcttcagcccccacctccagtgcagcgagttatggacccaggcttcctggacgtgtcgggaatttctctcttggacaacagcaatgccagtgtgtggcccagcctgccctcttccacagaactgaccaccacagctgtctcaacctcagggccagaggacatctgctccagcagcagttctcatgagcggggtggtgaggctacatggtctgggtcagagtttgaggtctccttcctggacagcccaggtgcccaagcccaggcggaccacctgcctcagctgactcttcctgacagtctcacctctgcagcctcaccagaagatgggctgtccgccgagctgcttgaagctcaggctgaggaggaaccagcaagcacagagggcctagatactgggacggaggctgaggggctggacagccaggcccagatctctaccacagaataa

SEQ ID NO: 625 - DNA, 1602 bp, human
atggcccatggttcagtgacattcagggatgtggccatagacttctcacaggaagaatgggaattcctggatcctgctcagagggacttatatagggatgtaatgtgggagaactacagcaacttcatttcactaggaccttccatttctaaaccagatgtgattaccttattggatgaagaaaggaaggaacctgggatggttgtgagggaagggacaagaagatactgccctgatttggagtccagatacaggaccaatactttatctccagaaaaggacatttatgaaatatattcatttcagtgggatataatggaaagaattaaaagctatagccttcagggttccatttttaggaatgattgggaatgcaaaagcaagattgagggggaaaaggaacaacaagagggatattttgggcaagtgaaaattacctctgaaaaaatgaccacttacaaaaggcacaattttcttactgagtatcagatcgttcataatggagaaaaggtgtatgagtgtaaggagtgtaggaagacctttattcgtcgctcaacacttagtcaacacctgagaattcatactggtgagaaaccttataagtgtaaggaatgtgggcaggcctttagacagcgtgcacatcttattcgacatcacaaacttcacaccggtgagaaaccctatgaatgtaaggagtgtgggaaggcctttacagtgctccaagaacttactcaacatcagagacttcatacgggtgaaaaaccctatgaatgtaaggaatgtggaaaggcctttagagtacatcagcaactggctcgacatcagagaattcacactggtgagaaaccctatgaatgtaaggactgtggaaagacctttagacagtgtacacaccttacacgccatcagagacttcatactgctgaaaagctctatgaatgtaaggaatgtgggaaagccttcgtatgtggtccagaccttagagtacatcagaaaattcattttggtgagaaaccctatgaatgtaaggagtgtggaaaggcttttagaatatgccaacaacttactgttcatcagagtattcatactggtgagaaaccctacgaatgtaaggaatgtgggaagacttttagattaagacaacaactagttcgccatcagagaatacatactcgtgagaaaccctatgaatgtatggaatgttggaagacctttagtagttactcacagcttatttcacaccagagcattcatattggtgagagaccctatgaatgtgaagagtgtggaaaggcctttagactgctctcacaacttactcagcatcaaagtattcacactggtgagaaaccttatgaatgtaaggaatgtagaaaaccttttagactgctctcacaacttacccaacatcagagtattcacactggtgagaaaccttatgaatgtaaggaatgtggtaaggcttttagactttattcatttcttactcaacaccagagaattcatactggtgagaagccctacaagtgtaaggagtgtaagaaggcctttagacagcattcacaccttactcagcatcagaagattcataatggaatttaa

SEQ ID NO: 626 - DNA, 735 bp, human
atgaacgggccggcggacggcgaagtggactacaaaaaaaaataccggaatctgaagcggaagctcaagttcctcatctacgagcacgagtgcttccaggaggagctgaggaaagcgcaaaggaaattactgaaggtgtcccgggacaagagtttcctcctagaccgacttctgcagtacgagaacgtggatgaagactcttcggactcagatgccactgcatcatcagataacagcgagacggaggggacacccaagttgtctgacacaccggcccctaagaggaagagaagccctccgctggggggcgccccctctccctccagcctctccctgcctccttcaacagggtttccccttcaggcctccggggtcccctccccatacctgagctcgctggcctcctcccgctaccccccattcccttctgactacctggccctgcagctgcccgagcccagtcccctgaggcccaagcgggagaaacggccccgcctgccccggaaactcaagatggcggtgggaccccccgactgccctgtgggagggccgctgaccttccctggccggggttctggggctggggtcgggacaaccctgacccccctcccaccccctaagatgcccccccccacgatcctgagcacggtccctcggcagatgttcagcgatgcaggtagcggggacgatgccttggatggagacgatgacctggtgatcgacatcccggagtga

SEQ ID NO: 627 - DNA, 1587 bp, human
atgggggacgctcccagccctgaagagaaactgcaccttatcacccggaacctgcaggaggttctgggggaagagaagctgaaggagatactgaaggagcgggaacttaaaatttactggggaacggcaaccacgggcaaaccacatgtggcttactttgtgcccatgtcaaagattgcagacttcttaaaggcagggtgtgaggtaacaattctgtttgcggacctccacgcatacctggataacatgaaagccccatgggaacttctagaactccgagtcagttactatgagaatgtgatcaaagcaatgctggagagcattggtgtgcccttggagaagctcaagttcatcaaaggcactgattaccagctcagcaaagagtacacactagatgtgtacagactctcctccgtggtcacacagcacgattccaagaaggctggagctgaggtggtaaagcaggtggagcaccctttgctgagtggcctcttataccccggactgcaggctttggatgaagagtatttaaaagtagatgcccaatttggaggcattgatcagagaaagattttcacctttgcagagaagtacctccctgcacttggctattcaaaacgggtccatctgatgaatcctatggttccaggattaacaggcagcaaaatgagctcttcagaagaggagtccaagattgatctccttgatcggaaggaggatgtgaagaaaaaactgaagaaggccttctgtgagccaggaaatgtggagaacaatggggttctgtccttcatcaagcatgtcctttttccccttaagtccgagtttgtgatcctacgagatgagaaatggggtggaaacaaaacctacacagcttacgtggacctggaaaaggactttgctgctgaggttgtacatcctggagacctgaagaattctgttgaagtcgcactgaacaagttgctggatccaatccgggaaaagtttaatacccctgccctgaaaaaactggccagcgctgcctacccagatccctcaaagcagaagccaatggccaaaggccctgccaagaattcagaaccagaggaggtcatcccatcccggctggatatccgtgtggggaaaatcatcactgtggagaagcacccagatgcagacagcctgtatgtagagaagattgacgtgggggaagctgaaccacggactgtggtgagcggcctggtacagttcgtgcccaaggaggaactgcaggacaggctggtagtggtgctgtgcaacctgaaaccccagaagatgagaggagtcgagtcccaaggcatgcttctgtgtgcttctatagaagggataaaccgccaggttgaacctctggaccctccggcaggctctgctcctggtgagcacgtgtttgtgaagggctatgaaaagggccaaccagatgaggagctcaagcccaagaagaaagtcttcgagaagttgcaggctgacttcaaaatttctgaggagtgcatcgcacagtggaagcaaaccaacttcatgaccaagctgggctccatttcctgtaaatcgctgaaaggggggaacattagctag

SEQ ID NO: 628 - DNA, 657 bp, human
atggcgcggaagaaggtgcgtccgcggctgatcgcggagctggcccgccgcgtgcgcgccctgcgggagcaactgaacaggccgcgcgactcccagctctacgcggtggactacgagaccttgacgcggccgttctctggacgccggctgccggtccgggcctgggccgacgtgcgccgcgagagccgcctcttgcagctgctcggccgcctcccgctcttcggcctgggccgcctggtcacgcgcaagtcctggctgtggcagcacgacgagccgtgctactggcgcctcacgcgggtgcggcccgactacacggcgcagaacttggaccacgggaaggcctggggcatcctgaccttcaaagggaagactgagagcgaggcgcgggagatcgaacacgtcatgtaccatgactggcggctggtgcccaagcacgaggaggaggccttcaccgcgttcacgccggcgccggaagacagcctggcctccgtgccgtacccgcctctcctccgggccatgattatcgcagaacgacagaaaaatggagacacaagcaccgaggagcccatgctgaatgtgcagaggatacgcatggaaccctgggattaccctgcaaaacaggaagacaaaggaagggccaagggcacccccgtctag

SEQ ID NO: 629 - DNA, 1221 bp, human
atgggcaaagtgtggaaacagcagatgtaccctcagtacgccacctactattacccccagtatctgcaagccaagcagtctctggtcccagcccaccccatggcccctcccagtcccagcaccaccagcagtaataacaacagtagcagcagtagcaactcaggatgggatcagctcagcaaaacgaacctctatatccgaggactgcctccccacaccaccgaccaggacctggtgaagctctgtcaaccatatgggaaaatagtctccacaaaggcaattttggataagacaacgaacaaatgcaaaggttatggttttgtcgactttgacagccctgcagcagctcaaaaagctgtgtctgccctgaaggccagtggggttcaagctcaaatggcaaagcaacaggaacaagatcctaccaacctctacatttctaatttgccactctccatggatgagcaagaactagaaaatatgctcaaaccatttggacaagttatttctacaaggatactacgtgattccagtggtacaagtcgtggtgttggctttgctaggatggaatcaacagaaaaatgtgaagctgttattggtcattttaatggaaaatttattaagacaccaccaggagtttctgcccccacagaacctttattgtgtaagtttgctgatggaggacagaaaaagagacagaacccaaacaaatacatccctaatggaagaccatggcatagagaaggagaggtgagacttgctggaatgacacttacttacgacccaactacagctgctatacagaacggattttatccttcaccatacagtattgctacaaaccgaatgatcactcaaacttctattacaccctatattgcatctcctgtatctgcctaccaggtgcaaagtccttcgtggatgcaacctcaaccatatattctacagcaccctggtgccgtgttaactccctcaatggagcacaccatgtcactacagcccgcatcaatgatcagccctctggcccagcagatgagtcatctgtcactaggcagcaccggaacatacatgcctgcaacgtcagctatgcaaggagcctacttgccacagtatgcacatatgcagacgacagcggttcctgttgaggaggcaagtggtcaacagcaggtggctgtcgagacgtctaatgaccattctccatatacctttcaacctaataagtaa

SEQ ID NO: 630 - DNA, 519 bp, human
atggcgggatcagtggccgacagcgatgccgtggtgaaactagatgatggccatttaaacaactctttgagctctccagttcaagcggacgtgtacttcccacgactgatagttccattttgtgggcacattaaaggtggcatgagaccaggcaagaaggtgttagtgatgggcatcgtagacctcaacccagagagctttgcaatcagcttgacctgtggggactcagaagaccctcctgccgatgtggcaatcgaactcaaagctgtgttcacagatcggcagctactcagaaattcttgtatatctggggagaggggtgaagaacagtcagcaatcccttactttccattcattccagaccagccattcagggtggaaattctttgtgagcacccacgtttccgagtgtttgtggatggacaccaactttttgatttttaccatcgcattcaaacgttatctgcaattgacaccataaagataaatggagacctccagatcaccaagcttggctga

SEQ ID NO: 631 - DNA, 1533 bp, human
atgccccgcggcttcctggtgaagcgcagcaagaagtccacgcccgtttcctaccgggtccgcggcggcgaggacggcgaccgcgcactgctgctctcgcccagctgcgggggcgcccgcgccgagcccccggcgccgagcccggtccccgggccgctgccgccgccgccgcccgcggagcgcgcccatgcagcgctcgccgccgcgcttgcctgcgcgcctgggccgcagccacccccgcagggcccgcgggccgcgcacttcggcaaccccgaggctgcgcaccccgcgccgctctacagtcccacgcggcccgtgagccgcgagcacgagaagcacaagtacttcgaacgcagcttcaacctgggctcgccggtctcggccgagtccttccccacgcccgccgcgctgctcggagggggcggcggcggcggcgcgagcggagctggcggaggcggcacctgcggcggcgacccgctgctcttcgcgcccgccgagctcaagatgggcacggcgttctcggctggcgccgaggcggcccgcggcccgggccccggccccccactgccccctgccgccgccctgcggcccccgggaaagcggcccccgccccctaccgccgcggagccgcccgccaaggcagtcaaggccccgggcgccaagaagcccaaggccatccgcaagctgcacttcgaggacgaggtgaccacgtcgcccgtgctggggctcaagatcaaggagggcccggtggaggcgccgcggggccgcgcggggggcgcggcgcggccgctgggcgagttcatctgccagctgtgcaaggaggagtacgccgacccgttcgcgctggcgcagcacaaatgctcgcgcatcgtgcgtgtggagtaccgctgtcccgagtgcgccaaggtcttcagctgcccggccaacctggcctcgcaccgccgctggcacaaaccgcggcccgcgcccgccgccgcccgcgcgccggagccagaagcagcagccagggctgaggcgcgggaggcacccggcggcggcagcgaccgggacacgccgagccccggcggcgtgtccgagtcgggctccgaggacgggctctacgagtgccatcactgcgccaagaagttccgccgccaggcctacctacgcaagcacctgctggcgcaccaccaggcgctgcaggccaagggcgcgccgctagcgcccccggccgaggacctactggccttgtaccccgggcccgacgagaaggcgccccaggaggcggccggcgacggcgagggggccggcgtgctgggcctgagtgcgtccgccgagtgccacctgtgcccagtgtgcggagagtcgttcgccagcaagggcgctcaggagcgccacctgcgcctgctgcacgccgcccaggtgttcccctgcaagtactgcccggccaccttctacagctcgcccggccttacgcggcacatcaacaagtgccacccatccgaaaacagacaggtgatcctcctgcaggtgcccgtgcgcccggcctgctag

SEQ ID NO: 632 - DNA, 1599 bp, human
atgatgtttcaggattcagtggcctttgaggatgtggctgtcagcttcacccaggaggagtgggctttgctggatccttcccagaagaatctctacagggatgtgatgcaggaaaccttcaagaacctgacctctgtaggaaaaacatggaaagttcagaacattgaagatgagtacaaaaatcccaggagaaatctaagtcttatgagagagaaactctgtgaaagtaaagaaagtcatcactgtggagaaagcttcaaccagattgcagatgacatgctgaacaggaaaactcttcctggaataacaccatgtgaaagcagtgtgtgtggagaagttggcacgggtcattcatctcttaatacgcatatcagagctgacactggacacaagtcatctgagtatcaggaatatggagagaatccatatagaaataaggaatgtaagaaagccttcagttatcttgactcctttcaatcacatgataaagcttgcactaaagagaaaccctatgatggtaaagaatgtacagaaaccttcatttcccattcatgcattcaaagacacagggtaatgcacagtggagatggaccttataaatgtaagttttgtgggaaagccttctattttctcaatttatgtcttatccatgaacgaattcacactggtgtgaaaccatataagtgtaaacaatgtggtaaggcctttactcgttccactacccttccagtacatgaaagaactcacacaggagtgaatgccgatgaatgtaaagaatgtgggaatgcattcagttttcctagtgaaattcgtagacataaaaggtctcacactggagaaaaaccctatgagtgtaagcaatgtgggaaagtcttcatttctttcagttccattcagtatcataagatgactcacactggagagaaaccctatgaatgtaagcagtgtgggaaagcctttagatgtggctcacaccttcaaaagcatggaaggactcacactggagagaaaccctatgaatgtaggcaatgtggtaaagccttcagatgtacctcggaccttcaaaggcatgaaaagacacacactgaggataaaccctatggatgtaagcagtgtgggaaaggctttagatgtgcttcacaacttcaaattcatgaaaggacgcacagtggagagaaaccccatgaatgtaaggaatgtggaaaagtattcaagtatttttcttccttgcgtatacatgaaaggacgcacactggagagaagccccatgaatgtaagcaatgtggaaaagcattcaggtatttctcttccttgcatatacatgaaaggacacacactggagataagccatatgagtgtaaggtatgtggcaaagccttcacttgttccagttccattcgatatcatgaaaggactcacactggagagaaaccctatgaatgtaagcactgtggtaaggcctttatttccaattacattcgatatcatgaaaggactcacactggagagaaaccctatcaatgcaagcaatgtggcaaagcctttattcgtgccagttcatgtcgagaacatgaaagaactcataccattaatagatga

SEQ ID NO: 633 - DNA, 501 bp, human
atgtcaaagctcggccgggccgcccggggcctcaggaagcccgagagaggcgtttccatcaaccagttttgcaaggagttcaatgagaggacaaaggacatcaaggaaggcattcctctgcctaccaagattttagtgaagcctgacaggacatttgaaattaagattggacagcccactgtttcctacttcctgaaggcagcagctgggattgaaaagggggcccggcaaacagggaaagaggtggcaggcctggtgaccttgaagcatgtgtatgagattgcccgcatcaaagctcaggatgaggcatttgccctgcaggatgtacccctgtcgtctgttgtccgctccatcatcgggtctgcccgttctctgggcattcgcgtggtgaaggacctcagttcagaagagcttgcagctttccagaaggaacgagccatcttcctggctgctcagaaggaggcagatttggctgcccaagaagaagctgccaagaagtga

SEQ ID NO: 634 - DNA, 985 bp, human
gcttccaccaagggcccatccgtcttccccctggcgccctgctccaggagcacctccgagagcacagccgccctgggctgcctggtcaaggactacttccccgaaccggtgacggtgtcgtggaactcaggcgccctgaccagcggcgtgcacaccttcccggctgtcctacagtcctcaggactctactccctcagcagcgtggtgaccgtgccctccagcagcttgggcacgaagacctacacctgcaacgtagatcacaagcccagcaacaccaaggtggacaagagagttggagtccaaatatggtcccccatgcccatcatgcccaggcacctgagttcctggggggaccatcagtcttcctgttccccccaaaacccaaggacactctcaatctcccggacccctgaggtcacgtgcgtggtggtggacgtgagccaggaagaccccgaggtccagttcaactggtacgtggatggcgtggaggtgcataatgccaagacaaagccgcgggaggagcagttcaacagcacgtaccgtgtggtcagcgtcctcaccgtcctgcaccaggactggctgaacggcaaggagtacaagtgcaaggtctccaacaaaggcctcccgtcctccatcgagaaaaccatctccaaagccaaaggggcagccccgagagccacaggtgtacaccctgcccccatcccaggaggagatgaccaagaaccaggtcagcctgacctgcctggtcaaaggcttctaccccagcgacatcgccgtggagtgggagagcaatgggcagccggagaacaactacaagaccacgcctcccgtgctggactccgacggctccttcttcctctacagcaggctaaccgtggacaagagcaggtggcaggaggggaatgtcttctcatgctccgtgatgcatgaggctctgcacaaccactacacacagaagagcctctccctgtctctgggtaaatga

SEQ ID NO: 635 - DNA, 2247 bp, human
atggcagattcctccgggcagcagggcaaaggccggcgtgtgcagccccagtggtcccctcctgctgggacccagccatgcagactccacctttacaacagcctcaccaggaacaaggaagtgttcatacctcaagatgggaaaaaggtgacgtggtattgctgtgggccaaccgtctatgacgcatctcacatggggcacgccaggtcctacatctcttttgatatcttgagaagagtgttgaaggattacttcaaatttgatgtcttttattgcatgaacattacggatattgatgacaagatcatcaagagggcccggcagaaccacctgttcgagcagtatcgggagaagaggcctgaagcggcacagctcttggaggatgttcaggccgccctgaagccattttcagtaaaattaaatgagaccacggatcccgataaaaagcagatgctcgaacggattcagcacgcagtgcagcttgccacagagccacttgagaaagctgtgcagtccagactcacgggagaggaagtcaacagctgtgtggaggtgttgctggaagaagccaaggatttgctctctgactggctggattctacacttggctgtgatgtcactgacaattccatcttctccaagctgcccaagttctgggagggggacttccacagagacatggaagctctgaatgttctccctccagatgtcttaacccgggttagtgagtatgtgccagaaattgtgaactttgtccagaagattgtggacaacggttacggctatgtctccaatgggtctgtctactttgatacagcgaagtttgcttctagcgagaagcactcctatgggaagctggtgcctgaggccgttggagatcagaaagcccttcaagaaggggaaggtgacctgagcatctctgcagaccgcctgagtgagaagcgctctcccaacgactttgccttatggaaggcctctaagcccggagaaccgtcctggccgtgcccttggggaaagggtcgtccgggctggcatatcgagtgctcggccatggcaggcaccctcctaggggcttcgatggacattcacggaggtgggttcgacctccggttcccccaccatgacaatgagctggcacagtcggaggcctactttgaaaacgactgctgggtcaggtacttcctgcacacaggccacctgaccattgcaggctgcaaaatgtcaaagtcactaaaaaacttcatcaccattaaagatgccttgaaaaagcactcagcacggcagttgcggctggccttcctcatgcactcgtggaaggacaccctggactactccagcaacaccatggagtcagcgcttcaatatgagaagttcttgaatgagtttttcttaaatgtgaaagatatccttcgcgctcctgttgacatcactggtcagtttgagaagtggggagaagaagaagcagaactgaataagaacttttatgacaagaagacagcaattcacaaagccctctgtgacaatgttgacacccgcaccgtcatggaagagatgcgggccttggtcagtcagtgcaacctctatatggcagcccggaaagccgtgaggaagaggcccaaccaggctctgctggagaacatcgccctgtacctcacccatatgctgaagatctttggggccgtagaagaggacagctccctgggattcccggtcggagggcctggaaccagcctcagtctcgaggccacagtcatgccctaccttcaggtgttatcagaattccgagaaggagtgcggaagattgcccgagagcaaaaagtccctgagattctgcagctcagcgatgccctgcgggacaacatcctgcccgagcttggggtgcggtttgaagaccacgaaggactgcccacagtggtgaaactggtagacagaaacaccttattaaaagagagagaagaaaagagacgggttgaagaggagaagaggaagaagaaagaggaggcggcccggaggaaacaggaacaagaagcagcaaagctggccaagatgaagattccccccagtgagatgttcttgtcagaaaccgacaaatactccaagtttgatgaaaatggtctgcccacacatgacatggagggcaaagagctcagcaaagggcaagccaagaagctgaagaagctcttcgaggctcaggagaagctctacaaggaatatctgcagatggcccagaatggaagcttccagtga

SEQ ID NO: 636 - DNA, 5385 bp, human
atgggggatgtgaagctggttgcctcgtcacacatttccaaaacctccctcagtgtggatccctcaagagttgactccatgcccctgacagaggcccctgctttcattttgccccctcggaacctctgcatcaaagaaggagccaccgccaagttcgaagggcgggtccggggttacccagagccccaggtgacatggcacagaaacgggcaacccatcaccagcgggggccgcttcctgctggattgcggcatccgggggactttcagccttgtgattcatgctgtccatgaggaggacaggggaaagtatacctgtgaagccaccaatggcagtggtgctcgccaggtgacagtggagttgacagtagaaggaagttttgcgaagcagcttggtcagcctgttgtttccaaaaccttaggggatagattttcagctccagcagtggagacccgtcctagcatctggggggagtgcccaccaaagtttgctaccaagctgggccgagttgtggtcaaagaaggacagatgggacgattctcctgcaagatcactggccggccccaaccgcaggtcacctggctcaagggaaatgttccactgcagccgagtgcccgtgtgtctgtgtctgagaagaacggcatgcaggttctggaaatccatggagtcaaccaagatgacgtgggagtgtacacgtgcctggtggtgaacgggtcggggaaggcctcgatgtcagctgaactttccatccaaggtttggacagtgccaataggtcatttgtgagagaaacaaaagccaccaattcagatgtcaggaaagaggtgaccaatgtaatctcaaaggagtcgaagctggacagtctggaggctgcagccaaaagcaagaactgctccagcccccagagaggtggctccccaccctgggctgcaaacagccagcctcagcccccaagggagtccaagctggagtcatgcaaggactcgcccagaacggccccgcagaccccggtccttcagaagacttccagctccatcaccctgcaggccgcaagagttcagccggaaccaagagcaccaggcctgggggtcctatcaccttctggagaagagaggaagaggccagctcctccccgtccagccaccttccccaccaggcagcctggcctggggagccaagatgttgtgagcaaggctgctaacaggagaatccccatggagggccagagggattcagcattccccaaatttgagagcaagccccaaagccaggaggtcaaggaaaatcaaactgtcaagttcagatgtgaagggcttgccgtgatggaggtggccccctccttctccagtgtcctgaaggactgcgctgttattgagggccaggattttgtgctgcagtgctccgtacgggggaccccagtgccccggatcacttggctgctgaatgggcagcccatccagtacgctcgctccacctgcgaggccggcgtggctgagctccacatccaggatgccctgccggaggaccatggcacctacacctgcctagctgagaatgccttggggcaggtgtcctgcagcgcctgggtcaccgtccatgaaaagaagagtagcaggaagagtgagtaccttctgcctgtggctcccagcaagcccactgcacccatcttcctgcagggcctctctgatctcaaagtcatggatggaagccaggtcactatgactgtccaagtgtcagggaatccaccccctgaagtcatctggctgcacaatgggaatgagatccaagagtcagaggacttccactttgaacagagaggaactcagcacagcctttgtatccaggaagtgttcccggaggacacgggcacgtacacctgcgaggcctggaacagcgctggagaggtccgcacccaggccgtgctcacggtacaagagcctcacgatggcacccagccctggttcatcagtaagcctcgctcagtgacagcctccctgggccagagtgtcctcatctcctgcgccatagctggtgacccctttcctaccgtgcactggctcagagatggcaaagccctctgcaaagacactggccacttcgaggtgcttcagaatgaggacgtgttcaccctggttctaaagaaggtgcagccctggcatgccggccagtatgagatcctgctcaagaaccgggttggcgaatgcagttgccaggtgtcactgatgctacagaacagctctgccagagcccttccacgggggagggagcctgccagctgcgaggacctctgtggtggaggagttggtgctgatggtggtggtagtgaccgctatgggtccctgaggcctggctggccagcaagagggcagggttggctagaggaggaagacggcgaggacgtgcgaggggtgctgaagaggcgcgtggagacgaggcagcacactgaggaggcgatccgccagcaggaggtggagcagctggacttccgagacctcctggggaagaaggtgagtacaaagaccctatcggaagacgacctgaaggagatcccagccgagcagatggatttccgtgccaacctgcagcggcaagtgaagccaaagactgtgtctgaggaagagaggaaggtgcacagcccccagcaggtcgattttcgctctgtcctggccaagaaggggacttccaagacccccgtgcctgagaaggtgccaccgccaaaacctgccaccccggattttcgctcagtgctgggtggcaagaagaaattaccagcagagaatggcagcagcagtgccgagaccctgaatgccaaggcagtggagagttccaagcccctgagcaatgcacagccttcagggcccttgaaacccgtgggcaacgccaagcctgctgagaccctgaagccaatgggcaacgccaagcctgccgagaccctgaagcccatgggcaatgccaagcctgatgagaacctgaaatccgctagcaaagaagaactcaagaaagacgttaagaatgatgtgaactgcaagagaggccatgcagggaccacagataatgaaaagagatcagagagccaggggacagccccagccttcaagcagaagctgcaagatgttcatgtggcagagggcaagaagctgctgctccagtgccaggtgtcttctgaccccccagccaccatcatctggacgctgaacggaaagaccctcaagaccaccaagttcatcatcctctcccaggaaggctcactctgctccgtctccatcgagaaggcactgcctgaggacagaggcttatacaagtgtgtagccaagaatgacgctggccaggcggagtgctcctgccaagtcaccgtggatgatgctccagccagtgagaacaccaaggccccagagatgaaatcccggaggcccaagagctctcttcctcccgtgctaggaactgagagtgatgcgactgtgaaaaagaaacctgcccccaagacacctccgaaggcagcaatgccccctcagatcatccagttccctgaggaccagaaggtacgcgcaggagagtcagtggagctgtttggcaaagtgacaggcactcagcccatcacctgtacctggatgaagttccgaaagcagatccaggaaagcgagcacatgaaggtggagaacagcgagaatggcagcaagctcaccatcctggccgcgcgccaggagcactgcggctgctacacactgctggtggagaacaagctgggcagcaggcaggcccaggtcaacctcactgtcgtggataagccagaccccccagctggcacaccttgtgcctctgacattcggagctcctcactgaccctgtcctggtatggctcctcatatgatgggggcagtgctgtacagtcctacagcatcgagatctgggactcagccaacaagacgtggaaggaactagccacatgccgcagcacctctttcaacgtccaggacctgctgcctgaccacgaatataagttccgtgtacgtgcaatcaacgtgtatggaaccagtgagccaagccaggagtctgaactcacaacggtaggagagaaacctgaagagccgaaggatgaagtggaggtgtcagatgatgatgagaaggagcccgaggttgattaccggacagtgacaatcaatactgaacaaaaagtatctgacttctacgacattgaggagagattaggatctgggaaatttggacaggtctttcgacttgtagaaaagaaaactcgaaaagtctgggcagggaagttcttcaaggcatattcagcaaaagagaaagagaatatccggcaggagattagcatcatgaactgcctccaccaccctaagctggtccagtgtgtggatgcctttgaagaaaaggccaacatcgtcatggtcctggagatcgtgtcaggaggggagctgtttgagcgcatcattgacgaggactttgagctgacggagcgtgagtgcatcaagtacatgcggcagatctcggagggagtggagtacatccacaagcagggcatcgtgcacctggacctcaagccggagaacatcatgtgtgtcaacaagacgggcaccaggatcaagctcatcgactttggtctggccaggaggctggagaatgcggggtctctgaaggtcctctttggcaccccagaatttgtggctcctgaagtgatcaactatgagcccatcggctacgccacagacatgtggagcatcggggtcatctgctacatcctaaaccgcctggactgcacgcagtgccttcagcatccatggctaatgaaagataccaagaacatggaggccaagaaactctccaaggaccggatgaagaagtacatggcaagaaggaaatggcagaaaacgggcaatgctgtgagagccattggaagactgtcctctatggcaatgatctcagggctcagtggcaggaaatcctcaacagggtcaccaaccagcccgctcaatgcagaaaaactagaatctgaagaagatgtgtcccaagctttccttgaggctgttgctgaggaaaagcctcatgtaaaaccctatttctctaagaccattcgcgatttagaagttgtggagggaagtgctgctagatttgactgcaagattgaaggatacccagaccccgaggttgtctggttcaaagatgaccagtcaatcagggagtcccgccacttccagatagactacgatgaggacgggaactgctctttaattattagtgatgtttgcggggatgacgatgccaagtacacctgcaaggctgtcaacagtcttggagaagccacctgcacagcagagctcattgtggaaacgatggaggaaggtgaaggggaaggggaagaggaagaagagtga

SEQ ID NO: 637 - DNA, 1902 bp, human
atgcccagctgcggtgcttgtacttgcggcgcggcggccgtccggctcatcacctcctcactcgcctccgcgcagagaggtatttctggtggtcgcattcatatgtcagttttaggaaggcttgggacatttgaaactcagattctgcaaagagctcctcttagatcctttacagaaacaccagcatactttgcctcaaaagatgggataagtaaagatggttctggagatggaaataagaaatcagcaagtgagggaagtagtaagaaatcaggctctgggaattctgggaaaggtggaaaccagctgcgctgtcctaaatgtggcgacttgtgcacacatgtagagacctttgtatcatccacccgttttgtcaagtgtgaaaagtgtcatcatttttttgttgtgctatctgaagcagactcaaagaaaagcataattaaagaacctgaatcagcagcagaagctgtaaaattggcattccaacagaaaccaccacctccccctaagaagatttataactacctcgacaagtatgttgttggccagtcatttgctaagaaggtgctttcagttgctgtgtacaatcattataagagaatatataataatatcccagctaatctgagacagcaagcagaggttgagaagcagacatcattaacaccaagagagttagaaataagaagacgggaggatgagtacagatttacaaaattgcttcagattgctggaattagcccacatggtaatgctttaggagcatcaatgcagcaacaggtaaatcaacaaatacctcaggaaaaacgaggaggtgaagtattggattcttctcatgatgacataaaacttgaaaaaagtaatattttgctgcttggaccaactgggtcaggtaaaactctgctggcacaaaccctagctaaatgccttgatgtcccttttgctatctgtgactgtacaactttgactcaggctggatatgtaggcgaagatattgaatctgtgattgcaaaactactccaagatgccaattataatgtggaaaaagcacaacaaggaattgtctttctggatgaagtagataagattggcagtgtgccaggcattcatcaattacgggatgtaggtggagaaggcgttcagcaaggcttattaaaactactagaaggcacaatagtcaatgttccagaaaagaattcccgaaagctccgtggagaaacagttcaagttgatacaacaaacatcctgtttgtggcatctggtgctttcaatggtttagacagaatcatcagcaggaggaaaaatgaaaagtatcttggatttggaacaccatctaatctgggaaaaggcagaagggctgcagctgctgcagaccttgctaatcgaagtggggaatcgaatactcaccaagacattgaagaaaaagatcggttattgcgtcatgtggaagccagagatctgattgagtttggcatgattcctgagtttgtgggacggttgcctgtggtggttccattgcatagcctagatgagaaaacacttgtacaaatattaactgagccacgaaatgctgttattcctcagtaccaggccttattcagcatggataagtgtgaactgaatgttactgaggatgctttgaaagctatagccagattggcactagaacgaaaaacaggtgcacgaggccttcggtccataatggaaaagctgttactagaaccaatgtttgaagtccctaattctgatatcgtatgtgtggaggttgacaaagaagtagtagaaggaaaaaaggaaccaggatacatccgggctccaacaaaagaatcctctgaagaggagtatgactctggagttgaagaagaaggatggccccgccaagcagatgctgcaaacagctaa

SEQ ID NO: 638 - DNA, 1515 bp, human
atggtggcccccggctccgtgaccagccggctgggctcggtattccccttcctgctagtcctggtggatctgcagtacgaaggtgctgaatgtggagtaaatgcagatgttgagaaacatcttgaattgggcaagaaattacttgcagctggacagctagctgatgctttatctcagtttcatgctgccgtagatggtgaccctgataactatattgcttattatcggagggctactgtctttttagctatgggcaaatcaaaagctgcacttcctgatttaactaaagtgattcaattgaagatggacttcactgcagcaagattacagagaggtcacttattactcaaacaaggaaaacttgatgaagcagaagatgattttaaaaaagtgctcaaatctaatccaagtgaaaatgaagaaaaggaagcacagtctcaacttataaaatctgatgaaatgcagcgtttgcgttcacaagcacttaacgcttttggaagtggagattatactgctgctatagccttccttgataagattttagaggtttgtgtttgggatgcagaactacgggaacttcgagctgaatgttttataaaagaaggagaacctaggaaagctataagtgacttaaaagctgcgtcaaagttgaagaatgataatactgaagcgttttataaaataagcacactgtactaccaactaggagaccacgaactgtccctcagtgaagttcgggaatgtcttaaacttgaccaggatcataaaaggtgttttgcacactataaacaagtaaagaaacttaataagctgattgagtcagctgaagagctcatcagagatggcagatacacagatgctaccagcaaatatgaatctgtcatgaaaacagagccaagcattgctgaatatacagttcgttcaaaggagaggatttgccactgcttttctaaggacgagaagcctgttgaagctattagggtttgttctgaagttttacagatggaacctgacaatgtgaatgccctgaaagatcgagcagaggcctatttgatagaggaaatgtatgatgaagctattcaggattatgaaactgctcaggaacacaatgaaaatgatcagcagattcgagaaggtctagagaaagcacaaagattattgaaacagtcgcagaaacgagattattataaaatcttgggagtaaaaagaaatgccaaaaagcaagaaattattaaagcataccgaaaattagcactgcagtggcacccagataacttccagaatgaagaagaaaagaaaaaagctgagaaaaagttcattgatatagcagctgctaaagaagtcctctctgatccagaaatgagaaagaagtttgacgacggagaagatcctttggatgcagagagccagcaaggaggcggcggcaaccctttccacagaagctggaactcatggcaagggttcaatcccttcagctcaggcggaccatttagatttaaattccacttcaattaa

SEQ ID NO: 639 - DNA, 1983 bp, human
atggacgtactggtgtctgagtgctccgcgcggctgctgcagcaggaagaagagattaaatctctgactgctgaaattgaccggttgaaaaactgtggctgtttaggagcttctccaaatttggagcagttacaagaagaaaatttaaaattaaagtatcgactgaatattcttcgaaagagtcttcaggcagaaaggaacaaaccaactaaaaatatgattaacattattagccgcctacaagaggtctttggtcatgcaattaaggctgcatatccagatttggaaaatcctcctctgctagtgacaccaagtcagcaggccaagtttggggactatcagtgtaatagtgctatgggtatttctcagatgctcaaaaccaaggaacagaaagttaatccaagagaaattgctgaaaacattaccaaacacctcccagacaatgaatgtattgaaaaagttgaaattgctggtcctggttttattaatgtccacttaagaaaggattttgtatcagaacaattgaccagtcttctagtgaatggagttcaactacctgctctgggagagaataaaaaggttatagttgacttttcctcccctaatatagctaaagagatgcatgtaggccacctgaggtcaactatcataggagagagtataagccgcctctttgaatttgcagggtatgacgtgctcaggttaaatcatgtaggagactgggggacccagtttggcatgctcatcgctcacctgcaagacaaatttccagattatctaacagtttcacctcctattggggatcttcaggtcttttataaggaatctaagaagaggtttgatactgaggaggaatttaagaagcgagcatatcagtgtgtagttctgctccagggtaaaaacccagatattacaaaagcttggaagcttatctgtgatgtctcccgccaagagttaaataaaatctatgatgcattggacgtctctttaatagagagaggggaatccttctatcaagataggatgaatgatattgtaaaggaatttgaagatagaggatttgtgcaggtggatgatggcagaaagattgtatttgtcccagggtgttccataccattaaccatagtaaaatcagatggaggttatacctatgatacatctgacctggctgctattaaacaaagactatttgaggaaaaagcagatatgattatctatgttgtggacaatggacaatctgtgcacttccagacaatatttgctgctgctcaaatgattggttggtatgaccctaaagtaactcgagtcttccatgctggatttggtgtggtgctaggggaagacaagaaaaagtttaaaacacgttcgggtgaaacagtgcgcctcatggatcttctgggagaaggactaaaacgatccatggacaagttgaaggaaaaagaaagagacaaggtcttaactgcagaggaattgaatgctgctcagacatccgttgcgtatggctgcatcaaatatgctgacctttcccataaccggttgaatgactacatcttctcctttgacaaaatgctagatgacagaggaaatacagctgcttacttgttgtatgccttcactagaatcaggtctattgcacgtctggccaatattgatgaagaaatgctccaaaaagctgctcgagaaaccaagattcttttggatcatgagaaggaatggaaactaggccggtgcattttacggttccctgagattctgcaaaagattttagatgacttatttctccacactctctgtgattatatatatgagctggcaactgctttcacagagttctatgatagctgctactgtgtggagaaagatagacagactggaaaaatattgaaggtgaacatgtggcgtatgctgctatgtgaagcagtagctgctgtcatggccaaggggtttgatatcctgggaataaaacctgtccaaaggatgtaa

SEQ ID NO: 640 - DNA, 1431 bp, human
atggacgcagtggcctttgaggatgtggctgtgaacttcacccaggaggaatgggctttgctgggtccatcacagaagaatttatacagatatgtgatgcaagaaaccatcaggaacctggactgtataagaatgatatgggaagaacagaatactgaagatcagtacaaaaatcctaggagaaatctaagatgtcatatggtagagagattcagtgaaagtaaagacagtagtcagtgtggagaaacatttagcctcattcgagatagtattgtgaacaacagcatttgtcctggagaagatccatgtcaaagcgctgagtgtgaagaagtcataatgggtcatttatcccttaatagccacatcagagttgattctggacacaaaccacatgagtatcaggaatatggagagaagccacatacacataaacaacgtgggaaagccttcagttaccatcactcctttcagtcgcgtggaaggcctcacactggaaagaaacgctatgagtgtaaggaatgtggaaaaaccttcagttctcgtagaaaccttcgaagacacatggtagtgcaaggtggaaatagaccttataaatgtaagttgtgtgggaaagcttttttttggcccagtttattacgtatgcatgaaagaactcacactggagagaaaccgtatgaatgtaagcagtgttctaaagcctttcctttttacagttcctatcgaagacatgagagaatgcacactggggagaaaccgtatgaatgtaagcagtgttctaaagccttgcctgattccagttcctatataagacatgaaagaactcacactggagagaaaccatatacatgtaaacagtgtgggaaagccttcagtgtttccagttcccttcgaagacatgaaaccactcacagtgcagagaaaccctatgagtgtaagcaatgcgggaaaacatttcatcatcttggaagctttcagatacacatgaaaaggcacactggagatcgacctcataaatgtaagatatgtgggaaaggctttgatcgtcccagtttagttcgatatcatgaacgaattcacactggagagaaaccctatgaatgcaagcagtgtgggaaaacgttatctcatagctcaagctttcgaagacacatgataatgcacactggaggtggacctcataaatgcaagatatgtgggaaagcttttgtttatcctagtgtatgtcaaagacacgaaaagtctcacagtggagagaaaccctatgaatgcaagcagtgtgggaaagcgttatctcatagctcaagctttcgaagacatatggtaatgcatacgggagatgggccgaataaatgcaaggtatgtgggaaagcctttgtttatcccagtgtatgtcaaagacatgaaaagactcactggagagaaacaatatga

SEQ ID NO: 641 - DNA, 1461 bp, human
atgtcgtcgtcgtcgccgccggcgggggctgccagcgccgccatctcggcctcggagaaagtggacggcttcacccggaaatcggtccgcaaggcgcagaggcagaagcgctcccagggctcgtcgcagtttcgcagccagggcagccaggcagagctgcacccgctgccccagctcaaagatgccacttcaaatgaacaacaagagcttttctgtcagaagttgcagcagtgttgtatactgtttgatttcatggactctgtttcagacttgaagagcaaagaaattaaaagagcaacactgaatgaactggttgagtatgtttcaactaatcgtggtgtaattgttgaatcagcgtattctgatatagtaaaaatgatcagtgctaacatcttccgtacacttcctccaagtgataatccagattttgatccagaagaggatgaacccacgcttgaggcctcttggcctcacatacagttggtatatgaattcttcttgagatttttggagagccctgatttccagcctagcattgcaaaacgatacattgatcagaaattcgtacaacagctcctggagctttttgatagtgaagatcccagagaacgtgacttcctgaagactgttctgcaccgaatttatgggaaatttcttggattaagagcattcatcagaaaacaaattaacaacattttcctcaggtttatatatgaaacagaacatttcaatggtgttgctgaacttcttgaaatattaggaagtattatcaatggctttgcattgccactgaaagcagaacataaacaatttctaatgaaggttcttattcctatgcatactgcaaaaggattagctttgtttcatgctcagctagcatattgtgttgtacagttcctggagaaagatacaacactaacagagccagtgatcagaggactgctgaaattttggccaaaaacctgcagtcagaaagaggtgatgtttttaggagaaattgaagaaatcttagatgtcattgaaccaacacagttcaaaaaaattgaagagccacttttcaagcagatatccaagtgtgtatccagttctcattttcaggttgcagaaagggcattgtacttctggaataacgaatatattcttagtttgattgaggagaacattgataaaattctgccaattatgtttgccagtttgtacaaaatttccaaagaacactggaatccgaccattgtagcactggtatacaatgtgctgaaaaccctaatggaaatgaatggcaagcttttcgatgaccttactagctcatacaaagctgaaagacagagagagaaaaagaaggaattggaacgtgaagaattatggaaaaaattagaggagctaaagctaaagaaagctctagaaaaacagaatagtgcttacaacatgcacagtattctcagcaatacaagtgccgaataa

SEQ ID NO: 642 - DNA, 1296 bp, human
atggatccagctgtggctctggtgctctgtctctcctgtttgtttctcctttcactctggaggcagagctctggaagagggaggctcccgtctggccccactcctctcccgattattggaaatatcctgcagttagatgttaaggacatgagcaaatccttaaccaatttctcaaaagtctatggccctgtgttcactgtgtattttggcctgaagcccattgtggtgttgcatggatatgaagcagtgaaggaggccctgattgatcatggagaggagttttctggaagaggaagttttccagtggctgaaaaagttaacaaaggacttggaatccttttcagcaatggaaagagatggaaggagatccggcgtttctgcctcatgactctgcggaattttgggatggggaagaggagcatcgaggaccgtgttcaagaggaagcccgctgccttgtggaggagttgagaaaaaccaatgcctcaccctgtgatcccactttcatcctgggctgtgctccctgcaatgtgatctgctctgttattttccatgatcgatttgattataaagatcagaggtttcttaacttgatggaaaaattcaatgaaaacctcaggattctgagctctccatggatccaggaaaagcacaatcaacagtctgaatttactgttgaaagcttgatagccactgtaactgatatgtttggggctggaacagagacaacgagcaccactctgagatatggactcctgctcctgctgaagtacccagaggtcacagctaaagtccaggaagagattgaatgtgtagttggcagaaaccggagcccctgtatgcaggacaggagtcacatgccctacacagatgctgtggtgcacgagatccagagatacattgacctcctccccaccaacctgccccatgcagtgacctgtgatgttaaattcaaaaactacctcatccccaagggcacgaccataataacatccctgacttctgtgctgcacaatgacaaagaattccccaacccagagatgtttgaccctggccactttctggataagagtggcaactttaagaaaagtgactacttcatgcctttctcagcaggaaaacggatgtgtatgggagagggcctggcccgcatggagctgtttttattcctgaccaccattttgcagaactttaacctgaaatctcaggttgacccaaaggatattgacatcacccccattgccaatgcatttggtcgtgtgccacccttgtaccagctctgcttcattcctgtctga

SEQ ID NO: 643 - DNA, 4521 bp, human
atggagccccgcagcatggagtacttctgcgcccaggtgcagcagaaggacgtcggcggccggctgcaggtcggccaggagctcctgctctaccttggcgcccccggcgccatctcggacctggaggaggacctgggccgcctaggcaagacagtcgacgcgctcaccggctgggtgggttcgagcaactaccgggtatcattaatgggattggaaattttaagtgcctttgtggacagattatcaacacgctttaaatcctatgtagcaatggttattgtagctttaatagacagaatgggagatgccaaagacaaggttcgagatgaagctcagactctgatattgaagttaatggatcaagtagcaccacctatgtacatttgggagcagttggcttctggttttaaacacaagaattttcgatctcgagaaggcgtgtgtctgtgtcttattgaaaccttaaacatttttggggctcagccactagtcatcagcaaattgataccacatttgtgtatcctgtttggagactccaacagtcaggtgagagatgctgcaatattggctatagtggagatttatagacatgtgggagaaaaagtgaggatggatctttataagagaggaattccccctgctagattagaaatgatatttgccaaatttgatgaagtgcaaagttcaggcggtatgattttgagtgtctgcaaagataaaagcttcgatgatgaagaatcagtggatggaaataggccatcatcagctgcatcagccttcaaggttcctgcacctaaaacatccggaaatcctgccaacagtgcaaggaagcctggttcagcaggtggccctaaggttggaggtgcttctaaggaaggaggtgctggagcagttgatgaagatgattttataaaagcttttacagatgtcccttctattcagatttattctagtcgagaactcgaagaaacattaaataaaatcagggaaattttgtcagatgataaacatgactgggatcagcgtgccaatgcactgaagaaaattcgatcactgcttgttgctggagctgcacagtatgattgcttttttcaacatttacgattgttggatggagcacttaaactttcagctaaggatcttagatcccaggtggttagagaagcttgtattactgtagcccacctttcaacagttttgggaaacaagtttgatcatggcgctgaagccattgtacctacactttttaatctcgtccccaatagtgcaaaagtcatggcaacttctggatgtgcagcaatcagatttatcattcggcatactcatgtacccagacttatacctttaataacaagcaattgcacatcaaaatcagttcccgtgaggagacgttcatttgaatttttagatttattgttgcaagagtggcagactcattcattggaaagacatgcagccgtcttggttgaaactattaaaaagggaattcatgatgctgacgctgaggccagagtggaggcaagaaagacatacatgggtcttagaaaccactttcctggtgaagctgaaacattatataattcccttgagccatcttatcagaagagtcttcaaacttacttaaagagttctggcagtgtagcatctcttccacaatcagacaggtcctcatccagctcacaggaaagtctcaatcgccctttttcttccaaatggtctacagcaaatccatcaactgtggctggaagagtatcagcaggcagcagcaaagccagttcccttccaggaagcctgcagcgttcacgaagtgacattgatgtgaatgctgctgcaggtgccaaggcacatcatgctgctggacagtctgtgcgaagcgggcgcttaggtgcaggtgccctgaatgcaggttcctatgcgtcactagaggatacttctgacaagctggatggaacagcatctgaagatggccgggtgagagcaaaactttcagcaccacttgctggcatgggaaatgccaaggcagattctagaggaagaagtcgaacaaaaatggtgtctcaatcacagcctggtagccggtctgggtctccaggaagagttctgaccacaacagccctgtccactgtgagctctggtgttcaaagagtcctggtcaattcagcctcagcacaaaaaagaagcaagataccacggagccagggctgtagcagagaggctagtccatctaggctttcagtggcccgaagcagtcgtattcctcgaccaagtgtgagtcaaggatgcagccgggaagctagtcgggagagcagcagagacacaagtcctgttcgctcttttcagcccctcggtccaggttatgggatcagccaatcaagtcgactgtcgtcttctgttagtgccatgcgagtcctgaacacaggttctgatgtggaggaggcggtggcagatgccttgaaaaaaccagctcgaagaagatatgaatcatatggaatgcattcagatgatgacgccaacagcgatgcatctagtgcttgttcagaacgctcctatagttctcgaaatggtagtattcctacatatatgaggcagacggaagatgtggcagaagtcctcaatagatgtgctagttccaattggtcagaaaggaaagaaggcctcctaggtctgcagaacttattaaaaaatcagagaacactaagtcgagttgaactgaaaagattatgtgaaattttcacaagaatgtttgctgaccctcatggcaagagagtattcagcatgtttttggagactctagtggatttcatacaagtccacaaagatgatcttcaagattggttgtttgtactgctgacacaactactaaaaaaaatgggtgctgatttgcttggatctgttcaggcaaaagttcagaaagcccttgatgttacaagagagtcttttccaaatgatcttcagttcaatattctaatgagatttacagttgatcagacccagacaccaagcttaaaggtgaaggttgctatccttaaatacatagaaactctggccaaacagatggatccaggagattttataaattccagtgaaactcgcctagcagtgtctcgggtcatcacttggacaacagaacccaaaagttctgatgttcggaaggcagcacagtcagtgctgatttcattatttgaactcaataccccagagtttacaatgttattaggagctttaccaaaaacttttcaggatggtgctaccaagcttcttcataatcaccttcgaaacactggcaatggaacccagagttccatggggagtcctttgacaagaccaacaccacgatcaccagctaactggtccagtcctcttacttctcctaccaatacatcacagaatactttatctccaagtgcatttgattatgacacagaaaatatgaactctgaagatatttatagctctcttagaggtgtcactgaagcaatccagaatttcagcttccgtagccaagaagatatgaatgagccattgaaaagggattctaaaaaagatgatggcgattcaatgtgtggtggtcctgggatgtctgacccaagagcaggaggtgatgctactgactcaagtcaaacagctcttgataataaagcttcattgctccattcaatgcctactcactcctctccacgctctcgagactataatccatataactattcagatagcatcagtcccttcaacaagtctgccctcaaggaagccatgtttgatgatgatgctgaccagtttcctgacgatctttccctagatcattctgacctagttgcagagttgttgaaggagctgtctaaccataatgagcgtgtagaagaaagaaaaattgccctctatgaacttatgaaactgacacaggaagaatcttttagtgtttgggatgaacacttcaaaacaatattgcttttattgcttgaaacgcttggagataaagagcctacaatcagggctttggcattaaaggttttaagagaaatcctaaggcatcaaccagcaagatttaaaaactatgcagaattgactgtcatgaaaacattggaagcacataaagatcctcataaggaggtggtgagatctgctgaggaagcggcatcagtgttggccacttcaattagtccagagcagtgcatcaaagtgctttgtcctatcattcaaactgcagactacccaattaatctggctgcaatcaaaatgcaaacaaaagtgatagagagagtgtccaaggaaaccctaaacctgcttttgccagagattatgccaggtctaatacagggttatgataattcagagagcagtgttcggaaagcttgtgtcttctgcctggtggctgttcatgcggtaattggtgatgaactaaaaccacatctcagtcaacttactggcagtaaaatgaagctactgaatctttacatcaaacgtgcacaaacaggttctggaggagctgatcccactactgatgtttctggacaaagttag

SEQ ID NO: 644 - DNA, 4671 bp, human
atggcggaccgcagcctggagggcatggcgctgcccctggaggtgcgggcgcgcctggccgagctggagctggagctgtcggaaggtgacatcacacaaaaaggatatgaaaagaagaggtcaaagttaattggagcctaccttccgcagcctccgagggtggaccaagctttgccgcaagaacgccgggctcctgtcactccttcctccgcctctcgctaccaccgccgacggtcttcagggtcacgagatgagcgctatcggtcagacgtccacacggaagctgtccaggcggctctggccaaacacaaagagcggaagatggcagtgcctatgccttccaaacgcaggtccctggtcgtgcagacctcgatggacgcctacacccctccagatacctcttctggctcagaagatgaaggctcagtgcagggggactcccagggcacccccacctccagccagggcagcatcaatatggagcactggatcagccaggccatccacggctccaccacgtccaccacctcctcgtcctctacgcagagcgggggcagcggggctgcccacaggctggcggacgtcatggctcagacccacatagaaaatcattctgcacctcctgacgtaaccacgtacacctcagagcactcgatacaggtggagagaccgcagggttccacggggtcccggacagcgcccaagtacggcaacgccgagctcatggagaccggggatggagtaccagtaagtagccgggtgtcagcaaaaatccagcagcttgtcaataccctcaaacgaccgaaacgaccacctttacgagaattctttgtcgatgactttgaagaattattagaagttcaacaaccggatccgaaccaaccaaagccggagggggcccagatgctggccatgcgcggagagcagctgggcgtggtcacgaactggccgccgtcgctggaggccgcactgcagaggtggggcaccatctcgcccaaggcgccctgcctgaccaccatggacaccaacgggaagcccctctacatcctcacttacggcaagctgtggacaagaagtatgaaggtcgcttacagcattctacacaaattaggcacaaagcaggaacccatggtccggcctggagatagggtggcactggtgttccccaacaatgatccggctgccttcatggcggctttctacggctgcctgctggccgaggtggtccccgtgcccatcgaggtgccgctcaccaggaaggacgcagggagccagcagataggtttcttgcttggaagctgtggagttactgtagccttgactagtgacgcctgccataaaggacttccaaaaagcccaacgggagagatcccacagtttaaaggttggccaaagctgctgtggtttgtcacagagtctaaacatctctccaaaccgccccgagactggttcccacacattaaagatgccaataacgacactgcgtatattgagtacaagacgtgtaaggatggcagtgtgctgggtgtgacggtgacgaggactgcgctgctgacacactgccaggccctgacgcaggcgtgtggctacacggaagctgaaaccattgtgaatgtgctggatttcaagaaggacgtcgggctctggcatggcatcctgacaagcgtcatgaacatgatgcatgtgatcagcatcccgtactcgctgatgaaggtgaaccctctctcctggatccagaaggtctgccagtacaaagcaaaagtggcgtgtgtgaaatcgagggatatgcattgggcattagtagcacacagagatcagagagacatcaacctctcctctctgcgaatgctgatagtggcggacggcgcgaacccctggtctatttcttcttgcgatgcatttctcaatgtcttccaaagtaaaggccttcgacaggaggtcatctgtccttgtgccagctcgccagaggccctcactgtggccatccggaggcccacggatgacagtaaccagcccccgggccggggtgtcctctccatgcatggactgacctatggggtcattcgtgtggactcggaagagaagctgtccgtgctcaccgtgcaggatgtcggcctcgtgatgcctggagccatcatgtgttcagtgaagccagacggggttcctcagctgtgcagaacggatgagatcggggagctgtgtgtgtgtgcagttgcgacgggcacgtcctactatggcctctctggcatgaccaagaacacctttgaggtgtttcccatgacaagctccggggctccgatcagtgaatacccattcataaggacaggcttgctggggttcgtgggtcccggaggcctcgtcttcgtggtgggcaagatggatggcctcatggtggtcagcgggcgcaggcacaacgccgacgacatcgtggccactgcgctggccgtagaacccatgaagtttgtctaccggggaaggatagccgtgttctcggtgaccgtgctgcacgacgagaggatcgtgatcgtggctgagcagaggcctgactccacggaagaggacagtttccagtggatgagccgtgtgctgcaggcgattgacagtatacatcaagttggagtttattgcctggccttggtgccagcaaacaccctccccaaaaccccgcttggtgggatccatttatcagaaacaaaacagctttttctggagggctctctgcacccctgcaatgtcctaatgtgcccccacacctgcgtcacaaacttgcctaagcctcgacagaagcagccagaaatcggccctgcctctgtgatggtggggaacctggtctctgggaagagaatcgcccaggccagtggcagagacctgggtcagatcgaagataacgaccaggcacgcaagttcctgttcctctcagaggtcttgcagtggagagcacagaccaccccggaccacatcctctacacgctgctcaactgtcggggtgcgatagcgaactcgctgacctgcgtgcagctgcacaagagagctgagaagatcgccgtgatgctgatggagaggggccaccttcaggacggcgaccacgtggccttggtctaccccccaggaatagacctgatagcagcgttttatggttgcctgtacgcaggctgtgtgccaataaccgtccgtcccccgcacccacagaacatcgcgacgacgttgcctaccgtcaagatgattgtggaggtgagtcgctctgcctgtctgatgacgacacagctgatctgtaagttgctgcggtccagggaggcggcggcggctgtggacgtcaggacgtggcccctcatcctggacacagatgatttgccaaagaagcggcctgcccagatctgcaaaccttgcaacccagacactcttgcatatctcgacttcagcgtgtccacaactgggatgctagctggcgtaaagatgtctcacgcagccaccagtgccttctgccgttccattaagctgcagtgtgaactttacccctctagagaagtggccatctgcctggacccttactgtggactgggatttgtcctctggtgcctctgcagtgtgtattctgggcaccagtccatcctgatcccgccctctgagctggaaaccaaccccgccttgtggcttcttgccgtgagtcagtacaaagtccgagacacgttttgctcctactccgtgatggagctgtgcaccaaggggctgggctcgcaaacagagtccctcaaggcgcgagggctggacttgtcccgagtgaggacctgcgtggttgtggcggaagagaggcctcggatcgcactcacacagtcgttctcaaagctgtttaaggacctgggccttcacccgcgggccgtcagcacctcgttcggttgcagggtgaacctggcgatttgcttgcagggaacctcaggacctgacccaaccactgtctacgtggacatgagagccctgagacacgacagagtccgcttagtggaaagaggatcccctcatagtctgcccctgatggaatcgggaaagatacttccaggggttcggattataattgccaacccagaaacaaaaggaccgctgggggactcacaccttggagagatttgggttcacagtgcccacaatgccagcggttatttcactatttacggagacgaatccctccagtcagatcacttcaactcaagactaagttttggagacacccagaccatctgggcacgcacaggctacttggggttcctgcggagaactgagctcacagatgcaaatggagagcgccatgatgccctctacgtggtaggggcactggacgaagccatggagctgcggggcatgcggtaccacccaatcgacattgagacctcggtcatcagagcccataaaagcgttacggaatgtgctgtgtttacctggacaaatttgttggtggttgtggttgagctggatgggtcggaacaagaagccttggacctggttcccttggtgaccaacgtggtcctggaggagcactacctgatcgtcggagtggtggtcgtggtggacatcggcgtcatccccatcaactcccgtggggagaagcagcgcatgcacctgcgagacgggtttttggcagaccagctagaccccatctatgtggcctacaacatgtag

SEQ ID NO: 645 - DNA, 3051 bp, human
atggccccccgcaccctctggagctgctacctctgctgcctgctgacggcagctgcaggggccgccagctaccctcctcgaggtttcagcctctacacaggttccagtggggccctcagccccggggggccccaggcccagattgccccccggccagccagccgccacaggaactggtgtgcctacgtggtgacccggacagtgagctgtgtccttgaggatggagtggagacatatgtcaagtaccagccttgtgcctggggccagccccagtgtccccaaagcatcatgtaccgccgcttcctccgccctcgctaccgtgtggcctacaagacagtgaccgacatggagtggaggtgctgtcagggttatgggggcgatgactgtgctgagagtcccgctccagcgctggggcctgcgtcttccacaccacggcccctggcccggcctgcccgccccaacctctctggctccagtgcaggcagccccctcagtggactggggggagaaggtcctggggagtcagagaaggtgcagcagctggaggaacaggtgcagagcctgaccaaggagctgcaaggcctgcggggcgtcctgcaaggactgagcgggcgcctggcagaggatgtgcagagggctgtggagacggccttcaacgggaggcagcagccagctgacgcggctgcccgccctggggtgcatgaaaccctcaatgagatccagcaccagctgcagctcctggacacccgcgtctccacccacgaccaggagctgggtcacctcaacaaccatcatggcggcagcagcagcagtgggggcagcagggccccagccccagcctcagcccctccgggccccagtgaggagctgctgcggcagctggagcagcggttgcaggagtcctgctccgtgtgcctggccgggctagatggcttccgccggcagcagcaggaggacagggagcggctgcgagcgatggagaagctgctggcctcggtggaggagcggcaacggcacctcgcagggctggcggtgggccgcaggccccctcaggaatgctgctctccagagctgggccggcgactggcagagctggagcgcaggctggatgtcgtggccggctcagtgacagtgctgagtgggcggcgaggcacagagctgggaggagccgcggggcagggaggccaccccccaggctacaccagcttggcctcccgcctgtctcgcctggaggaccgcttcaactccaccctgggcccttcggaggagcaggaggagagctggcctggggctcctggggggctgagccactggctgcctgctgcccggggccgactagagcagttgggggggctgctggccaatgtgagcggggagctgggggggcggttggatctgttggaggagcaggtggcaggggccatgcaggcatgcgggcagctctgctctggggcccctggggagcaggactctcaagtcagcgagatcctcagtgccttggagcgcagggtgctggacagtgaggggcagctgcggctggtgggctccggcctgcacacggtggaagcagcgggggaggcccggcaggccacgctggagggattacaagaggttgtgggccggctccaggatcgtgtggatgcccaggatgagacagctgcagagttcacactacggctgaatctcactgcggcccggctaggccaactggaggggctgctgcaggcccatggggatgagggctgtggggcctgtggcggagtccaagaggaactaggccgccttcgggatggtgtggagcgctgctcctgccccctgttgcctcctcggggtcctggggctggtccaggtgttgggggcccaagccgtgggcccctggacggcttcagcgtgtttgggggcagctcaggctcagccctgcaggccctgcaaggagagctctctgaggttattctcagcttcagctccctcaatgactcactgaatgagctccagaccactgtggagggccagggcgctgatctggctgacctgggggcaaccaaggaccgtatcatttctgagattaacaggctgcagcaggaggccacagagcatgctacagagagtgaagagcgcttccgaggcctagaggagggacaagcacaggccggccagtgccccagcttagaggggcgattgggccgtcttgagggtgtctgtgaacggttggacactgtggctgggggactgcagggcctgcgcgagggcctttccagacacgtggctgggctctgggctgggctccgggaaaccaacaccaccagccagatgcaggcagccctgctggagaagctggtcgggggacaggcgggcctgggcaggcggctgggtgcccttaacagctccctgcagctcctggaggaccgtctgcaccagctcagcctgaaggacctcactgggcctgcaggagaggctgggcccccagggcctcctgggctgcagggacccccaggccctgctggacctccaggatcaccaggcaaggacgggcaagagggccccatcgggccaccaggtcctcaaggtgaacagggagtggagggggcaccagcagcccctgtgccccaagtggcattttcagctgctctgagtttgccccggtctgaaccaggcacggtccccttcgacagagtcctgctcaatgatggaggctattatgatccagagacaggcgtgttcacagcgccactggctggacgctacttgctgagcgcggtgctgactgggcaccggcacgagaaagtggaggccgtgctgtcccgctccaaccagggcgtggcccgcgtagactccggtggctacgagcctgagggcctggagaataagccggtggccgagagccagcccagcccgggcaccctgggcgtcttcagcctcatcctgccgctgcaggccggggacacggtctgcgtcgacctggtcatggggcagctggcgcactcggaggagccgctcaccatcttcagcggggccctgctctatggggacccagagcttgaacacgcgtag

SEQ ID NO: 646 - DNA, 3231 bp, human
atggggatcctcagcatcacggaccagccgcccctggtccaggccatctttagccgagatgtggaggaagtgcgttccctactctcgcagaaggagaacatcaatgtgctggaccaagagaggcgaactccattgcatgctgctgcctacgtaggcgatgtccccatcctccagttgctactgatgtcaggtgctaatgtcaatgctaaggacacactgtggctgacccctcttcatcgtgctgctgcctcccgaaacgagaaggtgctggggctgctgctggcacattcagcagatgtgaatgcccgggacaagctgtggcagacaccactgcatgtggctgctgccaaccgggccaccaagtgtgctgaggctctggcacccctgttgagcagcctcaacgtggctgacaggagcgggcgcagtgctctgcaccatgcagtgcatagtgggcatcttgagacggtgaacctgctcctcaacaagggagccagcctgaatgtctgtgacaaaaaggagcggcagcctctgcattgggcagcttttctagggcacttggaggtcctaaaactgctggtggcacggggagcagacctcggctgcaaggaccgcaagggctatgggctgctccatacagctgctgccagtggccagattgaagtggtgaagtacctgcttcggatgggagcggagatcgatgaacccaatgcttttggaaacacagctttgcacatcgcctgctacctgggccaggatgctgtggctattgagctggtgaatgccggagccaatgtcaaccagccgaatgacaagggcttcacgccactgcatgtggctgcagtctccaccaatggcgctctctgcttggagctactggttaataatggggctgacgtcaactaccagagcaaagaagggaaaagtcctctgcacatggctgcaatccatggccgtttcacacgctcccagatcctcatccagaatggcagcgagattgattgtgccgacaaatttgggaacacgccactgcatgtggctgctcgatatggacacgagctgctcatcagcaccctcatgaccaatggcgcagataccgcccggcgtggcatccatgacatgttccccctgcacttagctgttctctttggattctctgactgttgtcgtaagcttctttcctcaggtcagttgtacagcattgtgtcttcactcagcaatgagcatgtgctttcagctgggtttgacatcaatacacctgacaaccttggccgtacctgtcttcatgctgctgcttccggagggaatgttgaatgtcttaatttgctgttgagcagtggagctgacttgaggaggagggacaaatttggcaggaccccactgcactatgcagctgctaacggtagctaccagtgtgcagtaacattggtgactgctggggcaggtgtcaacgaggccgactgtaaaggctgctctcccctccactacgctgccgcttctgacacttacaggagagcggaaccccatacaccttccagccatgatgccgaagaggacgagccactgaaggagtcccgcaggaaggaggccttcttctgtctggagttcttactggataacggtgcagacccctccctgcgggacaggcagggctacacagctgtgcactatgcagccgcctatggcaacagacagaacctcgaactgctcttagaaatgtcctttaactgcctggaggatgtggagagcaccattccagtcagccctttgcacttagctgcctacaacggtcactgtgaagccttgaagacgctggcggagacgctggtgaatctggacgtaagggaccacaagggccggaccgcactcttcctggccacggagcgcggctctactgagtgtgtggaggtgcttacagcccacggcgcctctgccctcatcaaggagcgcaagcgcaagtggacacccctgcacgctgctgctgcctctggccacactgactccctgcacttgctgatcgacagtggggaacgagctgacatcacagatgtcatggatgcctatggacagaccccactgatgctggccatcatgaatggccatgtggactgtgtacatctgctgctagagaaaggatccacagctgatgctgctgacctccggggccgcactgccctccaccgcggggcagtgactggctgtgaggactgcctggctgccctgctggaccacgacgcatttgtgctgtgccgagactttaagggccgcacgcccattcacctggcctcagcctgtggccacactgcagtactgcggaccctgctgcaggctgccctttccacagatcccctggatgccggggtggattacagcggatactcgcccatgcactgggcctcctacactggacatgaagattgtctggagttgttacttgaacacagcccgttttcgtacctggaaggaaaccccttcactcctttgcactgtgcagtgattaataaccaagacagcaccacagagatgctactgggagctctgggtgccaagattgtgaacagccgagatgccaaaggacggaccccccttcacgccgctgccttcgcggacaatgtctctgggctccggatgctgctgcagcatcaagctgaggtgaacgccactgaccacactggccgcactgcgctcatgacggcggctgagaacgggcagaccgctgctgtggaatttctgctgtatcgagggaaggcagaccttactgtgttggatgagaacaagaacacggccctccacttggcttgtagcaagggccatgagaaatgtgccctcatgatcctggcagaaacccaagaccttggccttatcaatgctaccaacagtgcgctgcagatgccactccacattgctgcccggaatggtctagcttctgtggtacaggccctgctgagtcatggggccacagtgctggctgtggatgaagaaggtcacaccccagcactggcctgtgcccccaacaaagatgtggcagactgcctggccttgatcctttccaccatgaagcctttcccacccaaggacgccgtcagtcctttcagcttcagcctgctcaagaactgcagcattgcagccgccaagacggtgggtggctgcggcgccctgccccatggggcctcctgcccctacagccaggagcggcccggcgccattgggttagatggctgctactctgagtag

SEQ ID NO: 647 - DNA, 3762 bp, human
atggaagagcatagctacatacaaaaggagctagatttacaaaatggtagcttagaggaagactctgtggtgcattctgttgagaacgattcccaaaacatgatggagagcctcagcccaaagaaatactcttccagtctgagatttaaagccaatggagactattctggctcctatttaaccctctcacaacctgtgcctgcaaagagaagcccttctcctttgggaaccagtgtcagaagcagcccctccttagccaaaatccagggaagcaagcagttctcttatgatggaactgacaaaaatattcctatgaaacctccaactcctttactcaacactacatcctccctcagtggatatccacttggaagagcagactttgatcattatactggccgggacagtgaaagggccttgaggctctcagagaagcctccctattccaaatatagctcaaggcataaatcgcatgacaatgtctactctcttggagggctggaaggtcggaaggcatctggctcgctcctggccatgtggaatggaagttccctgagtgatgctggcccgcctcctatcagcagatcgggagccgcaagcatgccttcaagcccaaagcaagccaggaaaatgagcattcaggacagcctggcgcttcaacccaagttaactagacacaaggagcttgcatctgaaaacatcaatttgagaactaggaagtactccagcagcagcctgagtcacatgggagcctacagccgatcacttcccaggttgtacagagccacagagaaccagctgacacctctcagcttgcctccaagaaactctctgggcaattccaaacgaacaaaacttggggaaaaggatctacctcatagcgtaatagacaatgacaattaccttaatttttcttctttgagctcaggggctttaccctataaaacctctgcttctgaaggcaatccttatgtaagttctaccctcagtgtccctgccagtccacgagtggctcggaagatgcttctggcctccacctcctcctgtgcctctgatgactttgatcaggcttcatatgtggggacaaacccgagtcattcacttcttgctggagagtcagacagagtttttgcgaccaggaggaacttctcttgtggatctgtggaatttgatgaggcagatttggaaagcctcagacaggcctcaggaaccccccagcctgcccttcgggaacggaaaagcagtattagctccatttcaggacgtgatgacctgatggattatcaccggcggcagagggaggaaagactcagggagcaggaaatggagcgattggagagacagcgtctggagaccatcctcagtctctgtgctgaatacacaaagcctgacagtcgcttatctactgggaccaccgtggaagatgtgcagaaaatcaacaaggagcttgagaagctgcagctctctgatgaggagtctgtgtttgaggaagccctcatgagccctgacacaagatacaggtgccaccggaaagactccctccctgatgcagacttggcaagctgtgggagtctcagtcagagcagtgccagcttctttacccccaggagcaccaggaatgatgaactactcagtgacctcacccggactcctccaccaccatcctccacctttccgaaagcttccagcgagtcctcttatctaagtatcctaccaaagaccccagagggtataagtgaagaacagagatctcaggagttggctgcaatggaagaaacccggatagtcattctgaacaacctcgaggaacttaagcaaaaaatcaaagacataaatgatcagatggatgagtctttcagagagttggatatggaatgtgctcttttggatggagaacagaaatctgaaacaactgaacttatgaaggagaaggagattttggatcatctaaaccggaaaatagctgaactggaaaagaacattgttggtgaaaagaccaaggagaaggtaaagcttgatgctgaaagggaaaaactagagaggcttcaggagctttactccgagcagaagacccagctggacaattgtcctgagtccatgagggaacagttacaacaacaactgaagagggatgctgacctgttggatgttgaaagcaaacactttgaagacctggagttccagcagcttgaacatgagagccgtctagatgaagaaaaggagaacttgactcaacagctcctgcgtgaagttgctgaatatcaacggaacatcgtttctagaaaggaaaaaatttctgcattgaaaaagcaagccaatcacattgttcagcaggctcagagagagcaagatcattttgtgaaagaaaagaataatttaataatgatgttgcaaagagaaaaggagaatctttgtaatttggaaaagaaatactccagcctctctggggggaaagggtttcccgttaaccccaatactttaaaagagggctatatcagtgtaaatgagattaatgagccgtgtggcaattccacgaatctatccccttccactcagtttcctgctgatgctgatgctgttgccactgagcctgccacagctgtgctggcgagccagccacagagtaaagagcactttagaagtctggaagaaaggaaaaaacagcataaagaaggcctctatctgagtgatactttgcctcgaaagaaaaccacatcttccatctccccacatttcagcagtgctactatggggagaagcatcaccccaaaggcccatctgcccctaggacagagtaacagctgtggaagtgtgctccctccctcactggcagccatggccaaagactcagaatctcggaggatgctcagaggttataatcaccaacagatgagtgaaggacacaggcagaaatctgaattttataaccgcacagcatctgaatcaaatgtctacttgaatagtttccattatccagatcacagctacaaggaccaggcctttgatactctgagcctcgatagctctgatagcatggagaccagcatctctgcttgctcaccagacaacatctctagtgccagcacttcaaatattgctagaatagaagaaatggagagacttttgaagcaggctcatgcagaaaagacgcggctgctcgaatccagggaacgggaaatggaagccaaaaaacgagccctggaagaagaaaaacgacgccgggaaatcctggaaaaacgattacaggaagaaactagccagaggcagaagttaatagaaaaggaagtaaaaataagggagagacaaagggcacaggctcgtcctttgacacgctacctgcctgtccggaaggaagactttgatttgcggagccatgtagagactgctggccacaatattgacacctgttaccatgtatcaatcacagagaagacctgccgaggattcctcatcaaaatgggtgggaaaattaaaacgtggaaaaaacgttggtttgtttttgatcggaacaagcgaacattctcttattatgcagacaagcatgaaactaaattgaaaggagtaatatactttcaagccattgaagaagtctattatgatcacctcaagaatgctaataagagtcctaatccgttactcacctttagcgtcaagactcatgacagaatctattatatggtagccccatcgccagaagccatgcggatctggatggatgttatagttacgggggcagaaggttacactcacttcttgttgtag

SEQ ID NO: 648 - DNA, 1617 bp, human
atggtggctgggtggttgacaaattactctcaggactcagtgacctttgaggatgtggctgtggacttcacccaggaggagtggactttgctggatcaaactcagagaaacttatacagagatgtgatgctggagaactataagaatctagttgcagtagattgggagagtcatattaataccaaatggtcagcacctcagcagaattttttgcaggggaaaacatccagtgtggtggaaatggagagaaaccattttggagaggaactgtttgactttaaccaatgtgaaaaagccttgagtgaacactcatgccttaagactcacaggagaacttactttagaaagaaaacctgtgagtgtaatcaatgtgaaaaagccttcagaaaaccctctatctttactttacacaagaaaactgatatcggagaggaacttcctaactgtaatcaatgtgaaacagccttcagccaacatctacatcttgtttgcaagaaaactagccaaaatctacatcttgtttgcaagaaaactcacactcaagagaaaccatataaatgcagtgactgtgaaaaaggcttaccttcctcctcacacctcagagaatgtgtaagaatttatggtggagagagaccatatactcataaggagtatgtcgaaaccttttctcattctacagccctttttgtacacatgcaaactcaagatggagaaaaattctatgaatgtaaagcatgtgggaaacccttcactgagtcgtcatatcttactcaacatttaagaactcatagtagagtgttacctatagaacataagaaatttggcaaagcctttgctttttccccagatcttgctaaacatataagacttagaactagaggaaaacactatgtttgtaatgaatgtggcaaagaatttacttgtttctcaaaactcaacattcacataagggttcacactggagaaaaaccgtatgagtgcaacaaatgtgggaaagccttcactgattcatcaggtcttataaaacacaggcgaactcacactggagaaaagccttatgaatgtaaggaatgtgggaaagcttttgctaactcttcacatcttactgtacatatgagaactcacactggtgagaagccttatcaatgtaaggaatgtggaaaagcctttattaattcctcttcctttaaaagtcacatgcagactcatcctggtgtaaaaccctatgactgtcaacagtgtgggaaagccttcattcgatcctcatttcttattcgacatttgagaagtcacagtgcagaaaggccttttgaatgtgaggaatgtgggaaagcctttagatactcctcgcaccttagtcaacataaaagaatacatacaggggagaggccatataaatgtcaaaagtgtgggcaagccttcagtatctcatcaggccttacagtacacatgagaactcacactggtgaacggccctttgaatgtcaggaatgtgggaaagcctttactcggtccacatatcttattcgacatctaagaagtcatagtgtggagaaaccatataaggaatgtgggcaaacctttagtaattcctcatgccttactgaatgtgtgtga

SEQ ID NO: 649 - DNA, 2349 bp, human
atgcagggcgaagagagcctccggatcctggtggagcccgaaggggacagcttcccgctgatggagatcagcacctgtgagaccgaggcctccgagcagtgggactatgtcctcgtggcccaacgtcacacccagagagacccccggcaggcgcggcagcaacagttcctggaggagctcaggagaaagggcttccacattaaggtgatccgggaccagaaacaggtcttctttgggatccgtgctgacaacagtgtctttggcctgtaccgcactctcctcctggagcctgaggggcctgccccccacgccgagctggccgcgccgaccaccatcccggtcaccacgagtctcagaatccgaatcgtgaacttcgttgtcatgaacaacaagacctcggctggtgagaccttcgaggatctgatgaaggacggggtctttgaggccaggttccccctgcacaagggggagggacgcctgaagaagacgtgggcgcggtggagacacatgttccgggagcagccagttgatgaaatcaggaactactttggggaaaaggtggccctgtacttcgtctggctgggctggtacacctacatgctggtgccggccgccctgacgggcctcttagtctttctgagcggattctcgctgtttgaggccagccagatcagcaaggagatctgtgaggcccacgacatcctcatgtgtcccctcggcgaccacagccgcaggtaccagcggctctcggaaacctgcacttttgccaagctcacccacctctttgacaatgatggcacggtggtgttcgccatcttcatggctctctgggccacggtgttcctggagatctggaagcggcagcgcgcccgcgtggtcctgcactgggacctgtacgtgtgggacgaggaacaggaggaaatggcacttcagctcattaactgccccgactacaagctccggccataccagcactcctacctacgcagcaccgtcatcctcgtcctgaccctgctcatgatctgcctcatgatcggcatggcccacgtcctggtggtctaccgcgtcctggcctccgcgctcttcagcagctcggccgtgcccttcctggaggagcaggtgaccacggccgtggtggtgaccggggctctggtgcactatgtgaccatcatcatcatgaccaagatcaacaggtgcgtggccctgaagctttgtgacttcgagatgcccaggaccttctcggagcgagagagcaggttcaccatccgcttcttcacactgcagttcttcacccatttctcgtctctcatctacatcgccttcatcctgggcaggatcaacggccaccccgggaagtccacgcgcctggcgggcttgtggaagctggaagagtgccacgccagcggctgcatgatggacctcttcgtgcagatggccatcatcatgggcctgaagcagacgctcagcaactgcgtcgagtacctggtcccgtgggtgacccacaagtgccgctctctgcgggcctccgagtccgggcacctgccccgggaccccgagctcagggactggcggcgcaactaccttctgaacccggtcaacaccttcagcctgttcgacgagttcatggagatgatgatccagtacggcttcaccaccatcttcgtggccgccttcccgctggcgccgctgctcgcgctcttcagcaacctcgtggagatccgcctggacgccatcaagatggtctggttgcagcggcgcctggtgccgcgcaaggccaaggacatcgggacctggctgcaggtgctggagaccatcggtgtgctggcggtcattgccaatgggatggtcattgccttcacatctgagttcatcccccgagtggtctacaagtaccgctatagcccatgcctgaaagaaggcaactctactgtcgactgcctcaagggctacgtcaaccacagcctgtccgtcttccacaccaaggacttccaggaccctgatgggattgagggctcagaaaacgtgactctgtgcagatacagggactaccgcaatccccccgattacaacttctccgagcagttctggttcctcctggccatccgcctggccttcgtcatcctctttgagcacgtggccttgtgcatcaagctcatcgccgcctggttcgtgcccgacatccctcagtcggtgaagaacaaggttctggaggtgaagtaccagaggctgcgtgagaagatgtggcatggaaggcagaggctgggtggggtgggggcaggctctcggcccccaatgcctgcccatcccaccccagcatccatcttcagtgccaggagcacagacgtgtag

SEQ ID NO: 650 - DNA, 2331 bp, human
atgaatccagaagaacaaatcgtgacatggcttatatctttgggagttttagagtcccctaaaaagaccatctgtgatccggaggagtttttaaagtcctcgctgaaaaatggggtagttctgtgcaaactgatcaacagactcatgcctggctctgtggaaaagttttgtctggatccccaaactgaagctgactgcatcaacaacatcaatgacttcctgaaaggatgtgcaaccctccaagtggaaatatttgatcctgatgacctttattcaggggtcaatttctccaaggtactgagtactcttttagctgtcaacaaagcaacagaagatcagctatcagaaagaccatgtggacgttcctcttctcttagtgctgctaatacttctcagacaaacccacagggagcagtttctagcacagtttcagggctgcaaaggcagtcaaagacagtggagatgacggaaaatggaagtcatcagttgatagtaaaagcaagattcaactttaagcagactaatgaggatgaactgtcagtttgtaagggggacatcatttacgtcacacgagttgaagaaggaggctggtgggaaggcacattaaatgggagaacaggctggttccccagtaattatgtccgtgaaattaaatccagtgagagacctctctccccaaaagccgtcaaaggatttgaaactgctccacttaccaagaattattatactgtggtgttacagaacatcctggacactgaaaaagaatatgctaaagaacttcagtctcttcttgttacttacttaagacccctgcagtccaataacaatctgagtactgtggaggttacatctttactgggaaacttcgaggaagtatgcacatttcaacagacactctgccaagccttggaagaatgttcaaagtttccagaaaaccagcacaaagtaggaggttgtctactgagtctcatgcctcattttaaatctatgtatctggcttactgtgcaaaccatccttcagctgtaaatgtgctcactcagcacagtgatgagttggaacaattcatggaaaatcaaggtgcatcgagcccaggtatcctcattttaacaacaaacctcagcaaaccattcatgcgactggagaaatatgttactctcttgcaagagttagaacggcatatggaggatactcatccagatcatcaggatattctgaaagcaatcgtagcattcaaaactctcatggggcaatgtcaagatctgaggaagagaaaacagctggagttacagatactgtccgaacctattcaggcatgggaaggagaagatattaaaaacttgggaaatgtgatttttatgtcacaagtaatggtgcagtatggagcatgtgaggaaaaagaggagcggtaccttatgttattttcaaatgtcctgataatgttatctgcaagtcctcggatgagtggctttatctatcagggaaaaataccaatagcaggaacggtggtgactagattagatgaaattgaagggaatgactgcacatttgaaatcactggtaacacagtggagagaattgtggtccattgtaacaacaaccaggacttccaggaatggttggagcagctgaacagactgatcagaggacctgcctcttgcagttcattatccaaaacctcatcgtcatcatgtagtgctcattcttcttttagctctaccggacagccccgaggacccttggagcctcctcaaattataaaaccgtggagtttaagttgtctacgacctgcacctccacttagaccatcagcagcactaggttataaagagaggatgtcttatatcttaaaggagtctagtaaaagccctaaaacgatgaagaaatttcttcataaaaggaagactgagagaaaaccatcggaggaggaatatgtgattaggaaaagtacagctgctctggaagaggatgctcaaatccttaaagtgatcgaagcctactgcaccagcgcaaattttcaacaaggccatggctcaagtactcgaaaagattccattccacaagtcctactccctgaggaagagaaactcatcattgaagaaaccagaagcaacggccagaccatcatggaagaaaagagccttgttgatactgtttacgccttgaaggacgaggtcagagaactgaagcaggaaaataaaagaatgaagcaatgcctggaagaagaactgaaatcaagaagggacctagaaaagctggtgcggaggcttttgaagcaaacagatgagtgtattcgaggcgagtccagtagcaagacctcaattcttccataa

SEQ ID NO: 651 - DNA, 1248 bp, human
atgcgtattcccgtagacccaagcaccagccgccgcttcacacctccctccccggccttcccctgcggcggcggcggcggcaagatgggcgagaacagcggcgcgctgagcgcgcaggcggccgtggggcccggagggcgcgcccggcccgaggtgcgctcgatggtggacgtgctggcggaccacgcaggcgagctcgtgcgcaccgacagccccaacttcctctgctccgtgctgccctcgcactggcgctgcaacaagacgctgcccgtcgccttcaaggtggtggcattgggggacgtgccggatggtacggtggtgactgtgatggcaggcaatgacgagaactactccgctgagctgcgcaatgcctcggccgtcatgaagaaccaggtggccaggttcaacgaccttcgcttcgtgggccgcagtgggcgagggaagagtttcaccctgaccatcactgtgttcaccaaccccacccaagtggcgacctaccaccgagccatcaaggtgaccgtggacggaccccgggagcccagacggcaccggcagaagctggaggaccagaccaagccgttccctgaccgctttggggacctggaacggctgcgcatgcgggtgacaccgagcacacccagcccccgaggctcactcagcaccacaagccacttcagcagccagccccagaccccaatccaaggcacctcggaactgaacccattctccgacccccgccagtttgaccgctccttccccacgctgccaaccctcacggagagccgcttcccagaccccaggatgcattatcccggggccatgtcagctgccttcccctacagcgccacgccctcgggcacgagcatcagcagcctcagcgtggcgggcatgccggccaccagccgcttccaccatacctacctcccgccaccctacccgggggccccgcagaaccagagcgggcccttccaggccaacccgtccccctaccacctctactacgggacatcctctggctcctaccagttctccatggtggccggcagcagcagtgggggcgaccgctcacctacccgcatgctggcctcttgcaccagcagcgctgcctctgtcgccgccggcaacctcatgaaccccagcctgggcggccagagtgatggcgtggaggccgacggcagccacagcaactcacccacggccctgagcacgccaggccgcatggatgaggccgtgtggcggccctactga

SEQ ID NO: 652 - DNA, 537 bp, human
atgtcgccctctggtcgcctgtgtcttctcaccatcgttggcctgattctccccaccagaggacagacgttgaaagataccacgtccagttcttcagcagactcaactatcatggacattcaggtcccgacacgagccccagatgcagtctacacagaactccagcccacctctccaaccccaacctggcctgctgatgaaacaccacaaccccagacccagacccagcaactggaaggaacggatgggcctctagtgacagatccagagacacacaagagcaccaaagcagctcatcccactgatgacaccacgacgctctctgagagaccatccccaagcacagacgtccagacagacccccagaccctcaagccatctggttttcatgaggatgaccccttcttctatgatgaacacaccctccggaaacgggggctgttggtcgcagctgtgctgttcatcacaggcatcatcatcctcaccagtggcaagtgcaggcagctgtcccggttatgccggaatcgttgcaggtga

SEQ ID NO: 653 - DNA, 2481 bp, human
atggcgaggctctgccggcgtgtcccctgcaccctgcttctcggcctggccgtggtgctgctgaaagcgcggctggtccccgcggccgccagagcggaactcagccgctccgacctcagcctcatccaacagcagcagcagcagcagcaacaacaacaacaacagcaaaagcagctggaggaggctgaggaggagaggacagaggtgcctggggcaacctccaccttgacggttccagtgtctgtatttatgttgaaagtccaggtgaatgacatcatcagtcgtcagtacctgagccaagcagttgtagaagtgtttgtaaactacacgaagacaaattccacagtaactaaaagcaatggagcagtgctgataaaagtaccctacaaattaggacttagtttaactattattgcttacaaagatggctacgtgttgacccctctgccttggaaaaccagaagaatgccaatatattcatcagttacactttcactgttcccgcaaagccaagcaaatatatggctatttgaagacactgttttaattactggaaaattagctgatgccaagtctcaaccaagtgttcagttttcaaaagccttaattaaacttcctgacaaccatcatattagcaacgttactggctatcttacagttctacaacagtttttgaaagtggacaattttctgcatacaactggaattactctcaataaaccaggttttgaaaacattgaattgactcctcttgctgcaatatgtgtgaaaatatattctggaggaaaagaactaaaggtcaatggctctattcaagtttctcttcctcttctacgtctgaatgatataagtgcaggggatcgcatacctgcttggacatttgatatgaacacaggtgcttgggtaaatcatggtcggggaatggtcaaggaacataacaatcatttaatctggacatatgatgcaccacatttggggtactggatagcagctccacttccaggaactagaggttcaggtataaatgaagattccaaggacataactgcctaccacacagtgtttcttacagccatattaggaggaacaatagtcattgtcattggattttttgctgtactactttgttattgcagggacaagtgtggtactccacagaaaagagaaagaaatatcactaaacttgaggtcctcaagagagaccagacaacttcaacaacacacataaatcatatcagtacagttaaagttgcattaaaagctgaggacaagtcgcagttattcaatgccaaaaactcctcatatagtcctcagaaaaaggaaccatcaaaggcagaaacagaagaaagagtttccatggtaaaaactcgggacgattttaaaatctacaatgaagatgtttcatttctatcagtcaatcaaaataattactcaagaaacccaacacagtctttggagcccaatgtagggtccaaacaacctaaacatattaacaacaatctatcttcatctctaggtgatgctcaagatgaaaagaggtatctcacaggtaatgaggaggcgtatgggcgttcccatattcctgaacagcttatgcatatttacagccaacccattgccatccttcaaacatctgaccttttctccacaccggaacaattacatactgctaagtcagctactttgccaagaaagggacagttagtctatggccaattgatggaaccagtaaatcgagagaactttacgcagaccttgcccaaaatgccaattcattctcatgcacagcccccagatgccagggaagaggatatcatacttgaaggtcaacagagcctgccatcccaggcttcagattggagccgatactcaagcagcttactggaatccgtctctgttcctggaacactaaatgaggctgttgtaatgactccattttcatcggaacttcaaggaatttcagaacagaccctcctggagctgtccaaaggaaagccctccccgcatcccagagcctggtttgtgtctcttgatggaaagccagttgcacaagtgaggcactcctttatagacctgaaaaagggcaagagaacccagagcaatgacaccagtctggactctggggtggacatgaatgagcttcactcaagtagaaagctcgagagggagaaaacattcatcaaaagcatgcatcagcccaagatcctttacttagaagatttagacctaagcagcagtgagagtggaaccaccgtctgttcccctgaggacccagctttaaggcacatcctagatggagggagtggagtgatcatggagcaccctggagaagagtcgccaggaaggaaaagcactgttgaagattttgaagctaatacatcccccactaaaagaaggggcagaccaccactagccaaaagagatagcaagactaacatctggaagaagcgagaggaacgcccactgattcccataaattaa

SEQ ID NO: 654 - DNA, 747 bp, human
atggagagagccagtctgatccagaaggccaagctggcagagcaggccgaacgctatgaggacatggcagccttcatgaaaggcgccgtggagaagggcgaggagctctcctgcgaagagcgaaacctgctctcagtagcctataagaacgtggtgggcggccagagggctgcctggagggtgctgtccagtattgagcagaaaagcaacgaggagggctcggaggagaaggggcccgaggtgcgtgagtaccgggagaaggtggagactgagctccagggcgtgtgcgacaccgtgctgggcctgctggacagccacctcatcaaggaggccggggacgccgagagccgggtcttctacctgaagatgaagggtgactactaccgctacctggccgaggtggccaccggtgacgacaagaagcgcatcattgactcagcccggtcagcctaccaggaggccatggacatcagcaagaaggagatgccgcccaccaaccccatccgcctgggcctggccctgaacttttccgtcttccactacgagatcgccaacagccccgaggaggccatctctctggccaagaccactttcgacgaggccatggctgatctgcacaccctcagcgaggactcctacaaagacagcaccctcatcatgcagctgctgcgagacaacctgacactgtggacggccgacaacgccggggaagaggggggcgaggctccccaggagccccagagctga

SEQ ID NO: 655 - DNA, 735 bp, human
atgaatgacccttttgccaggatggagacccgggggcctcagggagctgcgaatcccatggactcctcccgcagcctgggggacctcgggccttttccgcgggaggtagggcgcggggctccgctagctccgggcgcccggaatcccgcgacggcaggggcgagccgaagccagggcggcggccacgaggacagaacggcagatcgggccctcggacctcgggccggggaggaattggaccgtgagtcctgggtcagagagaaagtgctctttctcctgcacccagagaggtggttagggactcgaggggaccctgcacgggaagaggtggccggtgcagaggaccttcctcatgcgggtggagaggaccacggcgaggagcccaactacccttctgtctttcaacgagaaaagcgaatttctggcaggcgtgtagccccgccgcgggacgcagcagacccacccaaatacgtgcttgtgcgggtggaggattatcaggtaacacaagaagtgttgcagacctcctgggccaagggtcgcatgaccacgaggactgaggagcacttcgtgaccgcgctcacttttcgcagcagtagagagggacagcctggggaacgctggggccctgctgaatcccgggctctccaggcacgaacaggggcatcccgcgtccacgccgcggggaggagggtttcaccgtctccagggacttggctcgaggaaattaaactctaa

SEQ ID NO: 656 - DNA, 279 bp, human; identical to SEQ ID NO: 453

SEQ ID NO: 657 - DNA, 921 bp, human
atggccagcaacgttaccaacaagacagatcctcgctccatgaactcccgtgtattcattgggaatctcaacactcttgtggtcaagaaatctgatgtggaggcaatcttttcgaagtatggcaaaattgtgggctgctctgttcataagggctttgccttcgttcagtatgttaatgagagaaatgcccgggctgctgtagcaggagaggatggcagaatgattgctggccaggttttagatattaacctggctgcagagccaaaagtgaaccgaggaaaagcaggtgtgaaacgatctgcagcggagatgtacgggtcagtaacagaacacccttctccgtcccctctactcagctcctcttttgacttggactatgactttcaacgggactattatgataggatgtacagttacccagcacgtgtacctcctcctcctcctattgctcgggctgtagtgccctcgaaacgtcagcgtgtatcaggaaacacttcacgaaggggcaaaagtggcttcaattctaagagtggacagcggggatcttccaagtctggaaagttgaaaggagatgaccttcaggccattaagaaggagctgacccagataaaacaaaaagtggattctctcctggaaaacctggaaaaaattgaaaaggaacagagcaaacaagcagtagagatgaagaatgataagtcagaagaggagcagagcagcagctccgtgaagaaagatgagactaatgtgaagatggagtctgaggggggtgcagatgactctgctgaggagggggacctactggatgatgatgataatgaagatcggggggatgaccagctggagttgatcaaggatgatgaaaaagaggctgaggaaggagaggatgacagagacagcgccaatggcgaggatgactcttaa

SEQ ID NO: 658 - DNA, 894 bp, human
atggggtttgttaaagttgttaagaataaggcctactttaagagataccaagtgaaatttagaagacgacgagagggtaaaactgattattatgctcggaaacgcttggtgatacaagataaaaataaatacaacacacccaaatacaggatgatagttcgtgtgacaaacagagatatcatttgtcagattgcttatgcccgtatagagggggatatgatagtctgcgcagcgtatgcacacgaactgccaaaatatggtgtgaaggttggcctgacaaattatgctgcagcatattgtactggcctgctgctggcccgcaggcttctcaataggtttggcatggacaagatctatgaaggccaagtggaggtgactggtgatgaatacaatgtggaaagcattgatggtcagccaggtgccttcacctgctatttggatgcaggccttgccagaactaccactggcaataaagtttttggtgccctgaagggagctgtggatggaggcttgtctatccctcacagtaccaaacgattccctggttatgattctgaaagcaaggaatttaatgcagaagtacatcggaagcacatcatgggccagaatgttgcagattacatgcgctacttaatggaagaagatgaagatgcttacaagaaacagttctctcaatacataaagaacagcgtaactccagacatgatggaggagatgtataagaaagctcatgctgctatacgagagaatccagtctatgaaaagaagcccaagaaagaagttaaaaagaagaggtggaaccgtcccaaaatgtcccttgctcagaagaaggatcgggtagctcaaaagaaggcaagcttcctcagagctcaggagcgggctgctgagagctaa

SEQ ID NO: 659 - DNA, 324 bp, human; identical to SEQ ID NO: 456

SEQ ID NO: 660 - DNA, 381 bp, human; identical to SEQ ID NO: 457

SEQ ID NO: 661 - DNA, 603 bp, human; identical to SEQ ID NO: 554

SEQ ID NO: 662 - DNA, 1467 bp, human; identical to SEQ ID NO: 496

SEQ ID NO: 663 - DNA, 1929 bp, human; identical to SEQ ID NO: 561

SEQ ID NO: 664 - DNA, 1437 bp, human; identical to SEQ ID NO: 518

SEQ ID NO: 665 - DNA, 1209 bp, human; identical to SEQ ID NO: 531

SEQ ID NO: 666 - DNA, 2238 bp, human; identical to SEQ ID NO: 532

SEQ ID NO: 667 - DNA, 1215 bp, human; identical to SEQ ID NO: 560

SEQ ID NO: 668 - protein, 263 aa, human
  misc_feature (187)..(187): Xaa can be any naturally occurring amino acid
  misc_feature (208)..(208): Xaa can be any naturally occurring amino acid
  misc_feature (214)..(214): Xaa can be any naturally occurring amino acid
  misc_feature (222)..(222): Xaa can be any naturally occurring amino acid
  misc_feature (231)..(231): Xaa can be any naturally occurring amino acid
  misc_feature (243)..(243): Xaa can be any naturally occurring amino acid
  misc_feature (251)..(251): Xaa can be any naturally occurring amino acid
  misc_feature (255)..(255): Xaa can be any naturally occurring amino acid
  misc_feature (261)..(261): Xaa can be any naturally occurring amino acid
GAETMADHNPDSDSTPRTLLRRVLDTADPRTPRRPRSARAGARRALLETASPRKLSGQTRTIARGRSHGARSVGRSAHIQASGHLEEQTPRTLLKNILLTAPESSILMPESVVKPVPAPQAVQPSRQESSCGSLELQLPELEPPTTLAPGLLAPGRRKQRLRLSVFQQGVDQGLSLSQEPQGNADAXSLTRSLNLTFATPLQPQSVQXPGLARXPSARRAVXVGAFFAGSXKYFPGSSKHWGXRTPSRSFXPMGXVPPRGXTS

SEQ ID NO: 669 - protein, 138 aa, human
  misc_feature (138)..(138): Xaa can be any naturally occurring amino acid
GRVEAAVTVAPAGTEEGMSEEEQGSGTTTGCGLPSIEQMLAANPGKTPISLLQEYGTRIGKTPVYDLLKAEGQAHQPNFTFRVTVGDTSCTGQGPSKKAAKHKAAEVALKHLKGGSMLEPALEDSSSFSPLDSSLPEX

SEQ ID NO: 670 - protein, 311 aa, human
  misc_feature (221)..(221): Xaa can be any naturally occurring amino acid
  misc_feature (225)..(225): Xaa can be any naturally occurring amino acid
  misc_feature (233)..(233): Xaa can be any naturally occurring amino acid
  misc_feature (242)..(242): Xaa can be any naturally occurring amino acid
  misc_feature (251)..(252): Xaa can be any naturally occurring amino acid
  misc_feature (255)..(255): Xaa can be any naturally occurring amino acid
  misc_feature (260)..(260): Xaa can be any naturally occurring amino acid
  misc_feature (269)..(270): Xaa can be any naturally occurring amino acid
  misc_feature (274)..(274): Xaa can be any naturally occurring amino acid
  misc_feature (278)..(278): Xaa can be any naturally occurring amino acid
  misc_feature (282)..(282): Xaa can be any naturally occurring amino acid
  misc_feature (285)..(285): Xaa can be any naturally occurring amino acid
  misc_feature (289)..(289): Xaa can be any naturally occurring amino acid
  misc_feature (293)..(295): Xaa can be any naturally occurring amino acid
  misc_feature (297)..(297): Xaa can be any naturally occurring amino acid
  misc_feature (300)..(300): Xaa can be any naturally occurring amino acid
  misc_feature (303)..(304): Xaa can be any naturally occurring amino acid
  misc_feature (307)..(307): Xaa can be any naturally occurring amino acid
  misc_feature (309)..(309): Xaa can be any naturally occurring amino acid
APSRPSPDSSESDWETLDPSVLEDPNLKEREQLGSDQTNLFPKDSVPSESLPITVQPQANTGQVVLIPGLISGLEEDQYGMPLAIFTKGYLCLPYMALQQHHLLSDVTVRGFVAGATNILFRQQKHLSDAIVEVEEALIQIHDPELRKLLNPTTADLRFADYLVRHVTENRDDVFLDGTGWEGGDEWIRAQFAVYIHALLAATLQLDNEKILSDYGTTFVXSMEXITHKLQGXGNSNQASSXFAEIKFQNXXIFXGQYSXIRKSLRFLXXGFKXRGNXAKKXGNXLGPXPEWXXXTXKTXLAXXIWXNXFS

SEQ ID NO: 671 - protein, 297 aa, human
  misc_feature (259)..(260): Xaa can be any naturally occurring amino acid
  misc_feature (264)..(265): Xaa can be any naturally occurring amino acid
  misc_feature (270)..(271): Xaa can be any naturally occurring amino acid
  misc_feature (274)..(274): Xaa can be any naturally occurring amino acid
  misc_feature (282)..(283): Xaa can be any naturally occurring amino acid
  misc_feature (288)..(288): Xaa can be any naturally occurring amino acid
  misc_feature (290)..(291): Xaa can be any naturally occurring amino acid
  misc_feature (295)..(295): Xaa can be any naturally occurring amino acid
  misc_feature (297)..(297): Xaa can be any naturally occurring amino acid
ADAWADAWADAWAPAGPGAMAAVAALQLGLRAAGLGRVQRRKWKLNLIAELESRVLAEPVPLPADPMELKNLEYRPVKVRGCFDHSKELYMMPRTMVDPVREAREGGLISSSTQSGAYVVTPFHCTDLGVTILVNRGFVPRKKVNPETRQKGQIEGEVDLIGMVRLTETRQPFVPENNPERNHWHYRDLEAMARITGAEPIFIDANFQSTVPGGPIGGQTRVTLRNEHLQYIVTWYGLSAATSYLWFKKIPTWDTWCVXXSACXXPCPLXXCSXFKTALCWXXVATGXKXXGPFXPX

SEQ ID NO: 672 - protein, 256 aa, human
  misc_feature (110)..(110): Xaa can be any naturally occurring amino acid
  misc_feature (197)..(197): Xaa can be any naturally occurring amino acid
  misc_feature (217)..(217): Xaa can be any naturally occurring amino acid
  misc_feature (222)..(222): Xaa can be any naturally occurring amino acid
  misc_feature (244)..(245): Xaa can be any naturally occurring amino acid
  misc_feature (253)..(253): Xaa can be any naturally occurring amino acid
KDHDSPENGADSFDSSDSLLQSWNSQSSLLDVQRVPSFESFEDDCSQSLCLNKPTMSFKDYIQERSDPVEQGKPVIPAAVLAGFTGSGPIQLWQFLLELLSDKSCQSFIXWTGDGWEFKLADPDEVARRWGKRKNKPKMNYEKLSRGLRYYYDKNIIHKTSGKRYVYRFVCDLQNLLGFTPEELHAILGVQPDTEDXRRGTTAAPGSWTEWEAHPDXLLRGXQEAGWKCPGKCPETVALLHPNXXLTGCLLVXQRP

SEQ ID NO: 673 - protein, 250 aa, human
  misc_feature (250)..(250): Xaa can be any naturally occurring amino acid
TRSLKYGKLGQGVLVQVSPSLVKRQKTHFHDLPCGASVILGNNGFIWIYPTPEHKEEEAGGFIANLEPVSLADREVISRLRNCIISLVTQRMMLYDTSILYCYEASLPHQIKDILKPEIMEEIVMETRQRLLEQEGGGAPEARDCGPCRSEDCDVWSPYVAQQRLERSSLCLHRPCDGLQPTGLLSPVLTPSLGGRTVLPWVAAESGIRDSFSSFKCTVYSRMAPSIYGDPLSHSRHHRHMPMKCPIEHX

SEQ ID NO: 674 - protein, 175 aa, human
  misc_feature (175)..(175): Xaa can be any naturally occurring amino acid
AHASGLCVCMCDLCLQDQPGGTLDLTLIRARLQEKLSPPYSSPQEFAQDVGRMFKQFNKLTEDKADVQSIIGLQRFFETRMNEAFGDTKFSAVLVEPPPMSLPGAGLSSQELSGGPGDGPGWSPHGQPSLALFSVLSPHPHSPGGLTPTPWWPHPPVPHDMVFTSVDLIKTSPVX

SEQ ID NO: 675 - protein, 358 aa, human
  misc_feature (284)..(284): Xaa can be any naturally occurring amino acid
  misc_feature (290)..(290): Xaa can be any naturally occurring amino acid
  misc_feature (295)..(295): Xaa can be any naturally occurring amino acid
  misc_feature (298)..(298): Xaa can be any naturally occurring amino acid
  misc_feature (305)..(305): Xaa can be any naturally occurring amino acid
  misc_feature (308)..(308): Xaa can be any naturally occurring amino acid
  misc_feature (310)..(311): Xaa can be any naturally occurring amino acid
  misc_feature (320)..(320): Xaa can be any naturally occurring amino acid
  misc_feature (325)..(326): Xaa can be any naturally occurring amino acid
  misc_feature (329)..(329): Xaa can be any naturally occurring amino acid
  misc_feature (333)..(333): Xaa can be any naturally occurring amino acid
  misc_feature (338)..(338): Xaa can be any naturally occurring amino acid
  misc_feature (348)..(348): Xaa can be any naturally occurring amino acid
  misc_feature (350)..(351): Xaa can be any naturally occurring amino acid
  misc_feature (354)..(356): Xaa can be any naturally occurring amino acid
  misc_feature (358)..(358): Xaa can be any naturally occurring amino acid
AYIVDGLRECCQPVLVYIPPQAELRGGSWVVIDSSINPRHMEMYADRESRGSVLEPEGTVEIKFRRKDLVKTMRRVDPVYIHLAERLGTPELSTAERKELENKLKEREEFLIPIYHQVAVQFADLHDTPGRMQEKGVISDILDWKTSRTFFYWRLRRLLLEDLVKKKIHNANPELTDGQIQAMLRRWFVEVEGTVKAYVWDNNKDLAEWLEKQLTEEDGVHSVIEENIKCISRDYVLKQIRSLVQANPEVAMDSIIHMTQHISPTQRAEVIRILSTMDSPSTEXLPACPXPVSGXKGXSCLLQLXPLXMXXPRKPTLESXGIYFXXFRXCRHXGVNQXSPQPQSTTHXIXXAGXXXSX

SEQ ID NO: 676 - protein, 373 aa, human
  misc_feature (270)..(270): Xaa can be any naturally occurring amino acid
  misc_feature (275)..(275): Xaa can be any naturally occurring amino acid
  misc_feature (284)..(284): Xaa can be any naturally occurring amino acid
  misc_feature (286)..(286): Xaa can be any naturally occurring amino acid
  misc_feature (291)..(291): Xaa can be any naturally occurring amino acid
  misc_feature (297)..(297): Xaa can be any naturally occurring amino acid
  misc_feature (300)..(300): Xaa can be any naturally occurring amino acid
  misc_feature (303)..(303): Xaa can be any naturally occurring amino acid
  misc_feature (307)..(307): Xaa can be any naturally occurring amino acid
  misc_feature (312)..(312): Xaa can be any naturally occurring amino acid
  misc_feature (314)..(314): Xaa can be any naturally occurring amino acid
  misc_feature (317)..(318): Xaa can be any naturally occurring amino acid
  misc_feature (320)..(320): Xaa can be any naturally occurring amino acid
  misc_feature (322)..(323): Xaa can be any naturally occurring amino acid
  misc_feature (325)..(325): Xaa can be any naturally occurring amino acid
  misc_feature (328)..(328): Xaa can be any naturally occurring amino acid
  misc_feature (330)..(330): Xaa can be any naturally occurring amino acid
  misc_feature (333)..(333): Xaa can be any naturally occurring amino acid
  misc_feature (335)..(336): Xaa can be any naturally occurring amino acid
  misc_feature (338)..(338): Xaa can be any naturally occurring amino acid
  misc_feature (348)..(348): Xaa can be any naturally occurring amino acid
  misc_feature (350)..(350): Xaa can be any naturally occurring amino acid
  misc_feature (352)..(352): Xaa can be any naturally occurring amino acid
  misc_feature (357)..(357): Xaa can be any naturally occurring amino acid
  misc_feature (361)..(361): Xaa can be any naturally occurring amino acid
  misc_feature (365)..(365): Xaa can be any naturally occurring amino acid
  misc_feature (368)..(369): Xaa can be any naturally occurring amino acid
  misc_feature (371)..(373): Xaa can be any naturally occurring amino acid
AELGDAALRSHLDMSWPLFSQGISEQQSGLSVLLSSLQVPPRGEDSLEVPVEQFRIEEIAEGREEAVLPIPVDAKVGYGTSQSCSLLPSQVPFETRGPNVDSSTDMLVEDKVKSVSGPQGHHRSCLVNSGKDRLPQTMEPSPSETSLVERPQVGSVVHRTSLGSTLSLTRSPCALPLAECKEGLVCNGAPETENRASEQPPGLSTLQMYPTPNGHCANGEAGRSKDSLSRQLSAMSCSSAHLHSRNLHHKWLHSHSGRPSATSSPDQPSXSHLDXDGMSVYTDXIXQRLRXIESGPXQEXKTXKKQXRNKSXEXHTXXPXLXXKXGEXDXIPXRXXSXNVFSFTKNFXNXWXREKEXKPWXLTLXPVXXKXXX

SEQ ID NO: 677 - protein, 155 aa, human
  misc_feature (147)..(155): Xaa can be any naturally occurring amino acid
GVADPHNLKICCRVNGEVVQSSNTNQMVFKTEDLIAWVSQFVTFYPGDVILTGTPPGVGVFRKPPVFLKKGDEVQCEIEELGVIINKVVWLLHRPDIGGHLLPLSLAQGKAQWQVWAGASPASRLFSVEGRRTELSSINASGQSSKXXXXXXXXX

SEQ ID NO: 678 - protein, 264 aa, human
  misc_feature (204)..(204): Xaa can be any naturally occurring amino acid
  misc_feature (236)..(236): Xaa can be any naturally occurring amino acid
  misc_feature (239)..(239): Xaa can be any naturally occurring amino acid
  misc_feature (264)..(264): Xaa can be any naturally occurring amino acid
KFNEKDGHVERKSKNGLYEIENGRPRNPAGRTGLVGRGLLGRWGPNHAADPIITRWKRDSSGNKIMHPVSGKHILQFVAIKRKDCGEWAIPGGMVDPGEKISATLKREFGEEALNSLQKTSAEKREIEEKLYKLFSQDHLVIYKGYVDDPRNTDNAWMETEAVNYHDETGEIMDNLMLEAGDDAGKVKWVDINDKLKLYASHSXFIKLVAEKRDAHWSEDSEADCHAVLMVSRVAXAHXRAYTEKKQYHELYYKRAGKPLPITX

SEQ ID NO: 679 - protein, 254 aa, human
  misc_feature (254)..(254): Xaa can be any naturally occurring amino acid
EEEDEDTGWSGAYLPSAIEQTHPERVPAGTSPCSTYLSFFSTPSELAGPESLPSWALSDTDSRVSPASPAGSPSADFAVHGESLGDRHLRTLQISYDALKDENSKLRRKLNEVQSFSEAQTEMVRTLERKLEVKMIKEESDYHDLESVVQQVEQNLELMTKRAVKAENHVVKLKQEISLLQAQVSNFQRESEALRCGQGASLTVVKQNADVALQNLRVSTVHRLPSALVSELRPESVANSSMTDSGVKTREDSX

SEQ ID NO: 680 - protein, 86 aa, human
  misc_feature (3)..(3): Xaa can be any naturally occurring amino acid
  misc_feature (12)..(13): Xaa can be any naturally occurring amino acid
  misc_feature (15)..(15): Xaa can be any naturally occurring amino acid
  misc_feature (20)..(20): Xaa can be any naturally occurring amino acid
  misc_feature (23)..(23): Xaa can be any naturally occurring amino acid
  misc_feature (33)..(33): Xaa can be any naturally occurring amino acid
  misc_feature (36)..(36): Xaa can be any naturally occurring amino acid
  misc_feature (40)..(40): Xaa can be any naturally occurring amino acid
  misc_feature (43)..(43): Xaa can be any naturally occurring amino acid
  misc_feature (61)..(62): Xaa can be any naturally occurring amino acid
  misc_feature (64)..(64): Xaa can be any naturally occurring amino acid
  misc_feature (68)..(68): Xaa can be any naturally occurring amino acid
  misc_feature (70)..(72): Xaa can be any naturally occurring amino acid
  misc_feature (74)..(75): Xaa can be any naturally occurring amino acid
  misc_feature (78)..(79): Xaa can be any naturally occurring amino acid
  misc_feature (81)..(81): Xaa can be any naturally occurring amino acid
  misc_feature (86)..(86): Xaa can be any naturally occurring amino acid
HHXHHHGILFRXXYXIDLPXRAXTSSALIPRRXRLXRTVXRKXRAEVRGGVLCPVAQRSIXXRXSSCXVXXXPXXVPXXAXEVDRX

SEQ ID NO: 681 - protein, 434 aa, human
  misc_feature (434)..(434): Xaa can be any naturally occurring amino acid
GRAPSPLPRPCRPICARSRGCRASGAEPGAPGGGGAGGGAGAGAAAAGSAGPSTMAVYCYALNSLVIMNSANEMKSGGGPGPSGSETPPPPRRAVLSPGSVFSPGRGASFLFPPAESLSPEEPRSPGGWRSGRRRLNSSSGSGSGSSGSSVSSPSWAGRLRGDRQQVVAAGTLSPPGPEEAKRKLRILQRELQNVQVNQKVGMFEAHIQAQSSAIQAPRSPRLGRARSPSPCPFRSSSQPPGKGPGSRRPGPTNGRTKSCGLQSSVHFPNPSPASHSVTSHTTSHPKQPTPPPPPPPSPHTLPRVTLHPILHLISPLTTSPSTSPITHYTTSHTPTPLNPTPPHPKHSLLTLLHLNLIHTPYTLIPYSSPLFSLHLLHSTPPSPPPHPPPSTPPPNSHPLHLYLLFTSLYKHTTHHITTHKHYLLLHPYLSTYX

SEQ ID NO: 682 - protein, 334 aa, human
  misc_feature (257)..(257): Xaa can be any naturally occurring amino acid
  misc_feature (266)..(266): Xaa can be any naturally occurring amino acid
  misc_feature (273)..(274): Xaa can be any naturally occurring amino acid
  misc_feature (277)..(277): Xaa can be any naturally occurring amino acid
  misc_feature (279)..(281): Xaa can be any naturally occurring amino acid
  misc_feature (284)..(284): Xaa can be any naturally occurring amino acid
  misc_feature (286)..(286): Xaa can be any naturally occurring amino acid
  misc_feature (291)..(292): Xaa can be any naturally occurring amino acid
  misc_feature (310)..(310): Xaa can be any naturally occurring amino acid
  misc_feature (314)..(314): Xaa can be any naturally occurring amino acid
  misc_feature (316)..(318): Xaa can be any naturally occurring amino acid
  misc_feature (323)..(323): Xaa can be any naturally occurring amino acid
  misc_feature (327)..(334): Xaa can be any naturally occurring amino acid
AIPGLDDVTVEVSPLNVTSVTNGAHPEATSEQPQNSTQDSGLQESEVSAENILTVAKDPRYARYLKMVQVGVPVMAIRNKMISEGLDPDLLERPDAPVPDGESEKTVEESSDSESSFSDAFELHMHAGYIYILEIEPELSSKHQMATCPLPSFFYVKKIIIKQFPASMSCCNKGPQNEKDNLNKVQLVLQILRNILEMQAITVRHGGSRLSQHFGRPRRVDNLRSGVQDQPGQHGETSISTKNTKSSWAWQKLAGRXGRCLSQLLXKLRQENXXNPXRXXXWAXMXSLPSXXGDKSETLSNKKNAMTIFXGSPXEXXXKSKPXPKKXXXXXXXX

SEQ ID NO: 683 - protein, 327 aa, human
  misc_feature (282)..(282): Xaa can be any naturally occurring amino acid
  misc_feature (288)..(288): Xaa can be any naturally occurring amino acid
  misc_feature (294)..(294): Xaa can be any naturally occurring amino acid
  misc_feature (306)..(306): Xaa can be any naturally occurring amino acid
  misc_feature (309)..(312): Xaa can be any naturally occurring amino acid
  misc_feature (325)..(326): Xaa can be any naturally occurring amino acid
ADLATQKAKEETKEAGSLRSVLNKESHSPFGLDSFNSTAKVSPLTPKLFNSLLLGPTASNNKTEGSSLRDLLHSGPGKLPQTPLDTGIPFPPVFSTSSAGVKSKASLPNFLDHIIASVVENKKTSDASKRACNLTDTQKEVKEMVMGLNVLDPHTSHSWLCDGRLLCLHDPSNKNNWKIFRECWKQGQPVLVSGVHKKLKSELWKPEAFSQEFGDQDVDLVNCRNCAIISDVKVRDFWDGFEIICKRLRSEDGQPMVLKLKDWPPGEKFSETCQPGFEDLMXNLPLAXIYPNEXGRAQSGPLGYLXTLXXXXLGPPKKYNALWGXXP

SEQ ID NO: 684 - protein, 266 aa, human
  misc_feature (250)..(250): Xaa can be any naturally occurring amino acid
  misc_feature (266)..(266): Xaa can be any naturally occurring amino acid
KEKERLRDRDRERDRDKGKDRDRRRVKNGEHSWDLDREKNREHDKPEKKSASSGEMSKKLSDGTFKDSKAETETEISTRASKSLTTKTSKRRSKNSVEGDSTSDAEGDAGPAGQDKSEVPETPEIPNELSSNIRRIPRPGSARPAPPRVKRQDSMEALQMDRSGSGKTVSNVITESHNSDNEEDDQFVVEAAPQLSEMSEIEMVTAVELEEEEKHGGLVEKILETKKDYEKLQQSPNLGRRAISLVAWRXRRHRSREIRARTSSDX

SEQ ID NO: 685 - protein, 175 aa, human
MDIAIHHPWIRRPFFPFHSPSRLFDQFFGEHLLESDLFPTSTSLSPFYLRPPSFLRAPSWFDTGLSEMRLEKDRFSVNLDVKHFSPEELKVKVLGDVIEVHGKHEERQDEHGFISREFHRKYRIPADVDPLTITSSLSSDGVLTVNGPRKQVSGPERTIPITREEKPAVTAAPKK

SEQ ID NO: 686 - protein, 367 aa, human
  misc_feature (280)..(280): Xaa can be any naturally occurring amino acid
  misc_feature (282)..(282): Xaa can be any naturally occurring amino acid
  misc_feature (285)..(285): Xaa can be any naturally occurring amino acid
  misc_feature (294)..(294): Xaa can be any naturally occurring amino acid
  misc_feature (300)..(300): Xaa can be any naturally occurring amino acid
  misc_feature (314)..(314): Xaa can be any naturally occurring amino acid
  misc_feature (318)..(319): Xaa can be any naturally occurring amino acid
  misc_feature (322)..(323): Xaa can be any naturally occurring amino acid
  misc_feature (327)..(328): Xaa can be any naturally occurring amino acid
  misc_feature (331)..(331): Xaa can be any naturally occurring amino acid
  misc_feature (334)..(334): Xaa can be any naturally occurring amino acid
  misc_feature (337)..(337): Xaa can be any naturally occurring amino acid
  misc_feature (340)..(340): Xaa can be any naturally occurring amino acid
  misc_feature (342)..(342): Xaa can be any naturally occurring amino acid
  misc_feature (344)..(344): Xaa can be any naturally occurring amino acid
  misc_feature (350)..(350): Xaa can be any naturally occurring amino acid
  misc_feature (352)..(352): Xaa can be any naturally occurring amino acid
  misc_feature (357)..(358): Xaa can be any naturally occurring amino acid
  misc_feature (360)..(361): Xaa can be any naturally occurring amino acid
  misc_feature (363)..(364): Xaa can be any naturally occurring amino acid
  misc_feature (366)..(367): Xaa can be any naturally occurring amino acid
GVDLLADAVAVTMGPKGRTVIIEQSWGSPKVTKDGVTVAKSIDLKDKYKNIGAKLVQDVANNTNEEAGDGTTTATVLARSIAKEGFEKISKGANPVEIRRGVMLAVDAVIAELKKQSKPVTTPEEIAQVATISANGDKEIGNIISDAMKKVGRKGVITVKDGKTLNDELEIIEGMKFDRGYISPYFINTSKGQKCEFQDAYVLLSEKKISSIQSIVPALEIANAHRKPLVIIAEDVDGEALSTLVLNRLKVGLQVVAVKAPGVWQKEPARYGYCYWWCSXWXKRXDPESNVSLXTKKSWXVFVTKTSLLLKERXQGSXXKRXXNLDXXPPXNKXNRXQLXGXLXKWGQFXNXEKTIXXLXXTXXKXX

SEQ ID NO: 687 - protein, 304 aa, human
  misc_feature (304)..(304): Xaa can be any naturally occurring amino acid
VSGSLSPQPAMEEQPQMQDADEPADSGGEGRAGGPPQVAGAQAACSEDRMTLLLRLRAQTKQQLLEYKSMVDASEEKTPEQIMQEKQIEAKIEDLENEIEEVKVAFEIKKLALDRMRLSTALKKNLEKISRQSSVLMDNMKHLLELNKLIMKSQQESWDLEEKLLDIRKKRLQLKQASESKLLEIQTEKNKQKIDLDSMETQRGRSYDKTYRWRKLLLLFNMCSRTLFWGVKSIGQRILPLRKLFCSLRRMLTCNKNSFLTYFTFLAISTLIWNTSVHLSVHRNFRKAYPRLQLYSCGLFVVGX

SEQ ID NO: 688 - protein, 324 aa, human
  misc_feature (282)..(282): Xaa can be any naturally occurring amino acid
  misc_feature (287)..(287): Xaa can be any naturally occurring amino acid
  misc_feature (299)..(299): Xaa can be any naturally occurring amino acid
  misc_feature (301)..(301): Xaa can be any naturally occurring amino acid
  misc_feature (312)..(313): Xaa can be any naturally occurring amino acid
  misc_feature (318)..(320): Xaa can be any naturally occurring amino acid
  misc_feature (323)..(323): Xaa can be any naturally occurring amino acid
DSLPQGSDCCWTRRLCGARRNTCGVCMAALYLGHQLPLLLPHEELLGQPNWEPRCLGLVTTKALHYPLPREEEWMSLRVCLKKLHEGLLLTPLHSLSWSLISMSSRRVKKGTKSRSFKPHPHLRMDGFLCRPCRPLSQQTFPAALEPSKTSTTSHQWLVRQCPQGSCCMPLIRPSWLVAVFLVTHFPLRITTPAIKSSKLKTDALGKASEAISSYHFPLLCTSKARPEPQQGVGPESTLSLSDPGGCPHPPHVHCGSSVAAVSPLPLPQKGATVNLSSGSKXSGFFXNGPILLARLDEXNXQPFGLSPSFHXXLSLGXXXLFXF

SEQ ID NO: 689 - protein, 356 aa, human
  misc_feature (278)..(278): Xaa can be any naturally occurring amino acid
  misc_feature (294)..(294): Xaa can be any naturally occurring amino acid
  misc_feature (296)..(296): Xaa can be any naturally occurring amino acid
  misc_feature (302)..(302): Xaa can be any naturally occurring amino acid
  misc_feature (308)..(308): Xaa can be any naturally occurring amino acid
  misc_feature (313)..(314): Xaa can be any naturally occurring amino acid
  misc_feature (316)..(316): Xaa can be any naturally occurring amino acid
  misc_feature (319)..(319): Xaa can be any naturally occurring amino acid
  misc_feature (321)..(323): Xaa can be any naturally occurring amino acid
  misc_feature (325)..(325): Xaa can be any naturally occurring amino acid
  misc_feature (329)..(329): Xaa can be any naturally occurring amino acid
  misc_feature (331)..(331): Xaa can be any naturally occurring amino acid
  misc_feature (340)..(341): Xaa can be any naturally occurring amino acid
  misc_feature (344)..(344): Xaa can be any naturally occurring amino acid
  misc_feature (347)..(348): Xaa can be any naturally occurring amino acid
  misc_feature (350)..(350): Xaa can be any naturally occurring amino acid
  misc_feature (356)..(356): Xaa can be any naturally occurring amino acid
GQQKIKELELEVLKHTQSIKSQNNLQEKLVQEKSKVADAEEKILDLQRKLEHAHKVCLTDTCISEKQQLEEKIKEATQNEAKVKQQYQEEQQKRKLLYQNVDELHRQVRTLQDKENLLEMTCSQQQSRIQQQEALLKQLENEKRKYDESRVFLYSSARTAHRKLVPRSGALLKKIPENVEATLELGNRQRLEEFGGLRRRQEDQEQWLTTVIPALERLREDCLRPGVQDQPGKHSEPLSQQKNNPDMVAWTCSTSYSGGGGKITAGRSGLQAMIMPLXYSLGDPARLCLKKKKXGXKFVTSXRLVNCXDPNTXXNXDGXAXXXGXQWKXGXFGNWKNVPXXPLXKLXXWXLVPGLX

SEQ ID NO: 690 - protein, 257 aa, human
  misc_feature (206)..(206): Xaa can be any naturally occurring amino acid
  misc_feature (238)..(238): Xaa can be any naturally occurring amino acid
  misc_feature (242)..(242): Xaa can be any naturally occurring amino acid
  misc_feature (249)..(250): Xaa can be any naturally occurring amino acid
APGDSGGGSSGCSAPSHLGRPRPDSPSETHCLGLRTFSSCPTKVKLGDLGGAGSIASRSPNTIGETEVAVGGRDLSAMEPNDSTSTAVEEPDSLEVLVKTLDSQTRTFIVGAQMNVKEFKEHIAASVSIPSEKQRLIYQGRVLQDDKKLQEYNVGGKVIHLVERAPPQTHLPSGASSGTGSASATHGGGSPPGTRGPGASVHDRNXNSYVMVGTFNLPSDGSAVDVHINHGTGPRFKXEPRXTGWGWFXXDQGYTEL

SEQ ID NO: 691 - protein, 273 aa, human
  misc_feature (166)..(166): Xaa can be any naturally occurring amino acid
  misc_feature (194)..(194): Xaa can be any naturally occurring amino acid
  misc_feature (196)..(196): Xaa can be any naturally occurring amino acid
  misc_feature (215)..(215): Xaa can be any naturally occurring amino acid
  misc_feature (219)..(219): Xaa can be any naturally occurring amino acid
  misc_feature (222)..(222): Xaa can be any naturally occurring amino acid
  misc_feature (229)..(229): Xaa can be any naturally occurring amino acid
  misc_feature (231)..(233): Xaa can be any naturally occurring amino acid
  misc_feature (239)..(241): Xaa can be any naturally occurring amino acid
  misc_feature (246)..(247): Xaa can be any naturally occurring amino acid
  misc_feature (249)..(251): Xaa can be any naturally occurring amino acid
  misc_feature (258)..(258): Xaa can be any naturally occurring amino acid
  misc_feature (262)..(265): Xaa can be any naturally occurring amino acid
  misc_feature (267)..(269): Xaa can be any naturally occurring amino acid
  misc_feature (273)..(273): Xaa can be any naturally occurring amino acid
GGRCPRRHGAGEAMAPAASRLRAEAGLGALPRRALAQYLLFLRLYPVLTKAATSGILSALGNFLAQMIEKKRKKENSRSLDVGGPLRYAVYGFFFTGPLSHFFYFFMEHWIPPEVPLAGLRRLLLDRLVFAPAFLMLFFLIMNFLEGKDASAFAAKMRGGFWPALXMNWRVWNATTVHQHQLRPSEVPGALRQXGXSVLVCLPGLLGEMTTAGKXIKCXVDXGLGVSPXPXXXKTIHQXXXESKIXXFXXXQKWKKKXKKSXXXXKXXXFKKX

SEQ ID NO: 692 - protein, 322 aa, human
  misc_feature (288)..(288): Xaa can be any naturally occurring amino acid
  misc_feature (300)..(300): Xaa can be any naturally occurring amino acid
  misc_feature (313)..(313): Xaa can be any naturally occurring amino acid
  misc_feature (321)..(321): Xaa can be any naturally occurring amino acid
AHASDVGTGPSACPLSPRLGLVCSGSWAPNSWSSFFQDRKRRGNLDMEKLYSENEGMASNQGKMENEEQPQDERKPEVTCTLEDKKLENEGKTENKGKTGDEEMLKDKGKPESEGEAKEGKSEREGESEMEGGSEREGKPEIEGKPESEGEPGSETRAAGKRPAEDDVPRKAKRKTNKGLAHYLKEYKEAIHDMNFSNEDMIREFDNMAKVQDEKRKSKQKLGAFLWMQRNLQDPFYPRGPREFRGGCRAPRRDIEDIPYVCPWQAFTRPCALPLRYFTLGIPPVASXLLTYLHAVFSVXMFLCYMEKLLMVXCKLKTHLXT

SEQ ID NO: 693 - protein, 116 aa, human
  misc_feature (116)..(116): Xaa can be any naturally occurring amino acid
GVFHCCTFCSSGGQKTARCACGGTMPGGYLGCGHGHKGHPGHPHWSCCGKFNEKSECTWTGGQSAPRSLLRTVALWVCAQPFKAAGSTTDFQRTQTFVHSKETDRIKNKVPYLALX

SEQ ID NO: 694 - protein, 253 aa, human
  misc_feature (135)..(135): Xaa can be any naturally occurring amino acid
  misc_feature (154)..(154): Xaa can be any naturally occurring amino acid
  misc_feature (175)..(175): Xaa can be any naturally occurring amino acid
  misc_feature (181)..(181): Xaa can be any naturally occurring amino acid
  misc_feature (187)..(188): Xaa can be any naturally occurring amino acid
  misc_feature (190)..(190): Xaa can be any naturally occurring amino acid
  misc_feature (192)..(192): Xaa can be any naturally occurring amino acid
  misc_feature (196)..(196): Xaa can be any naturally occurring amino acid
  misc_feature (199)..(199): Xaa can be any naturally occurring amino acid
  misc_feature (202)..(202): Xaa can be any naturally occurring amino acid
  misc_feature (209)..(210): Xaa can be any naturally occurring amino acid
  misc_feature (212)..(212): Xaa can be any naturally occurring amino acid
  misc_feature (215)..(216): Xaa can be any naturally occurring amino acid
  misc_feature (218)..(218): Xaa can be any naturally occurring amino acid
  misc_feature (220)..(220): Xaa can be any naturally occurring amino acid
  misc_feature (224)..(224): Xaa can be any naturally occurring amino acid
  misc_feature (229)..(230): Xaa can be any naturally occurring amino acid
  misc_feature (235)..(236): Xaa can be any naturally occurring amino acid
  misc_feature (240)..(241): Xaa can be any naturally occurring amino acid
  misc_feature (244)..(244): Xaa can be any naturally occurring amino acid
  misc_feature (246)..(249): Xaa can be any naturally occurring amino acid
  misc_feature (251)..(251): Xaa can be any naturally occurring amino acid
  misc_feature (253)..(253): Xaa can be any naturally occurring amino acid
AGGQGRRTAGGGGGGGAGVGAGAGAMEAERGPERRPAERSSPGQTPEEGAQALAEFAALHGPALRASGVPERYWGRLLHKLEHEVFDAGEVFGIMQVEEVEEEEDEAAREVRKQQPNPGNELCYKVIVTRESGLXAAHPNSIFLIDHAWTCRVXHARQQLQQVPGLLHRMANLMXIDFHGXLPSTAXXLXLXEMWXFNXTYXLAHGTAXXKXPVXXIXDXFSSXIHQSXXAQTSXXQPSXXNCXKXXXXNXLX

SEQ ID NO: 695 - protein, 639 aa, human
MEPAMEPETLEARINRATNPLNKELDWASINGFCEQLNEDFEGPPLATRLLAHKIQSPQEWEAIQALTVLETCMKSCGKRFHDEVGKFRFLNELIKVVSPKYLGSRTSEKVKNKILELLYSWTVGLPEEVKIAEAYQMLKKQGIVKSDPKLPDDTTFPLPPPRPKNVIFEDEEKSKMLARLLKSSHPEDLRAANKLIKEMVQEDQKRMEKISKRVNAIEEVNNNVKLLTEMVMSHSQGGAAAGSSEDLMKELYQRCERMRPTLFRLASDTEDNDEALAEILQANDNLTQVINLYKQLVRGEEVNGDATAGSIPGSTSALLDLSGLDLPPAGTTYPAMPTRPGEQASPEQPSASVSLLDDELMSLGLSDPTPPSGPSLDGTGWNSFQSSDATEPPAPALAQAPSMESRPPAQTSLPASSGLDDLDLLGKTLLQQSLPPESQQVRWEKQQPTPRLTLRDLQNKSSSCSSPSSSATSLLHTVSPEPPRPPQQPVPTELSLASITVPLESIKPSNILPVTVYDQHGFRILFHFARDPLPGRSDVLVVVVSMLSTAPQPIRNIVFQSAVPKVMKVKLQPPSGTELPAFNPIVHPSAITQVLLLANPQKEKVRLRYKLTFTMGDQTYNEMGDVDQFPPPETWGSL

SEQ ID NO: 696 - protein, 230 aa, human
  misc_feature (230)..(230): Xaa can be any naturally occurring amino acid
ETAARPGTRRPQSRGTMAPAGRPGAKKGILERLESGEVVIGDGSFLITLEKRGYVKAGLWTPEAVIEHPDAVRQLHMEFLRAGSNVMQTFTFSASEDNMESKGLPSLATAALGPTPARRWSSRRVLSGQGKRTSWCSLWGSTRLTVAKRGLWISQNIPLDWSPELPPDGIFKNTPERPTTWGSGTLAGAVDLSPTTSGQLQRSWPQKGLFAPASKNTATGEVVWNAHKPX

SEQ ID NO: 697 - protein, 381 aa, human
  misc_feature (289)..(289): Xaa can be any naturally occurring amino acid
  misc_feature (292)..(293): Xaa can be any naturally occurring amino acid
  misc_feature (299)..(299): Xaa can be any naturally occurring amino acid
  misc_feature (302)..(302): Xaa can be any naturally occurring amino acid
  misc_feature (304)..(304): Xaa can be any naturally occurring amino acid
  misc_feature (307)..(307): Xaa can be any naturally occurring amino acid
  misc_feature (317)..(317): Xaa can be any naturally occurring amino acid
  misc_feature (325)..(325): Xaa can be any naturally occurring amino acid
  misc_feature (328)..(328): Xaa can be any naturally occurring amino acid
  misc_feature (330)..(331): Xaa can be any naturally occurring amino acid
  misc_feature (334)..(334): Xaa can be any naturally occurring amino acid
  misc_feature (336)..(336): Xaa can be any naturally occurring amino acid
  misc_feature (338)..(338): Xaa can be any naturally occurring amino acid
  misc_feature (340)..(340): Xaa can be any naturally occurring amino acid
  misc_feature (342)..(342): Xaa can be any naturally occurring amino acid
  misc_feature (346)..(346): Xaa can be any naturally occurring amino acid
  misc_feature (348)..(348): Xaa can be any naturally occurring amino acid
  misc_feature (352)..(357): Xaa can be any naturally occurring amino acid
  misc_feature (359)..(361): Xaa can be any naturally occurring amino acid
  misc_feature (373)..(373): Xaa can be any naturally occurring amino acid
  misc_feature (375)..(375): Xaa can be any naturally occurring amino acid
  misc_feature (381)..(381): Xaa can be any naturally occurring amino acid
ETTLFTQAAHGGQASLMKISDSTLKTVPATSQLSKPGTTMLRVAGGVITTATSPAVALSANGPAQQSEGMAPVSSSTVSSVTKTSGQQQVCVSQATVGTCKAATPTVVSATSLVPTPNPISGKATVSGLLKIHSSQSSPQQAVLTIPSQLKPLSVNTSGGVQTILMPVNKVVQSFSTSKPPAILPVAAPTPVVPSSAPAAVAKVKTEPETPGPSCLSQEGQTAVKTEESSELGNYVIKIDHLETIQQLLTAVVKKIPLITAKSEDASCFSAKSVEQYYGWNIGKRRAAXWQXXMTMRKXLTXNXGKXSEISPPDSPXNKQIAHWXRCXGXXPRXLXPXEXGXPFEXVXNPNXXXXXXAXXXFLWKPWRKWRPXKXSKRNPX

SEQ ID NO: 698 - protein, 243 aa, human
  misc_feature (201)..(201): Xaa can be any naturally occurring amino acid
  misc_feature (215)..(216): Xaa can be any naturally occurring amino acid
GKTEQDLALGTDAEGQKVKDSMRVLLPVLLNKNHDNCDKIRAILLYIFSINGTTEENLDRLIQNVKIENESDMIRNWSYLGVPIVPQSQQGKPLRKDRSAEETFQLSRWTPFIKDIMEDAIDNRLDSKEWPYCSQCPAVWNGSGAVSARQKPRANYLEDRKNGSKLIVFVIGGITYSEVRCAYEVSQAHKSCEVIIGSTHXLTPKKLLDDIKMLXXPKDKVSLIKDERFFLEGLEILTNMLNN

SEQ ID NO: 699 - protein, 269 aa, human
  misc_feature (268)..(269): Xaa can be any naturally occurring amino acid
SSGEAPDSITWKPYDAADLDPTENPFDLLDFNQTQPERGDNNLTRIVGGQECKDGECPWQALLINEENEGFCGGTILSEFYILTAAHCLYQAKRFKVRVGDRNTEQEEGGEAVHEVEVVIKHNRFTKETYDFDIAVLRLKTPITFRMNVAPACLPERDWAESTLMTQKTGIVSGFGRTHEKGRQSTRLKMLEVPYVDRNSCKLSSSFIITQNMFCAGYDTKQDDACPGEQRGPHVTRFKTPTSRHRQLGRRLCPGEYGIYTRSPLPQXX

SEQ ID NO: 700 - protein, 429 aa, human
  misc_feature (394)..(394): Xaa can be any naturally occurring amino acid
  misc_feature (429)..(429): Xaa can be any naturally occurring amino acid
HAANMAPVEHVVADAGAFLRHAALQDIGKNIYTIREVVTEIRDKATRRRLAVLPYELRFKEPLPEYVRLVTEFSKKTGDYPSLSATDIQVLALTYQLEAEFVGVSHLKQEPQKVKVSSSIQHPETPLHISGFHLPYKPKPPQETEKGHSACEPENLEFSSFMFWRNPLPNIDHELQELLIDRGEDVPSEEEEEEENGFEDRKDDSDDDGGGWITPSNIKQIQQELEQCDVPEDVQVGCLTTNFAMQKVLLQMGLHRAGVKRMLNPEGRSYFLGCPGCSKKPLKLPQWFVPLGEKNPEKKGRNRKKKKDPGKGFFPEPQGGETPGPPGNLFPPPRGGKKVPPFLRGGRRSPPGGPPQGGEEKKRGSPPKISPGGGPFLKKKFPPHLPTSEPENNXLKGGENNFIPPPTKIFYKNTTPLPPPQNIWSVPPX

SEQ ID NO: 701 - protein, 292 aa, human
  misc_feature (23)..(23): Xaa can be any naturally occurring amino acid
  misc_feature (88)..(88): Xaa can be any naturally occurring amino acid
  misc_feature (184)..(184): Xaa can be any naturally occurring amino acid
  misc_feature (221)..(221): Xaa can be any naturally occurring amino acid
  misc_feature (248)..(248): Xaa can be any naturally occurring amino acid
  misc_feature (259)..(259): Xaa can be any naturally occurring amino acid
  misc_feature (264)..(264): Xaa can be any naturally occurring amino acid
  misc_feature (269)..(270): Xaa can be any naturally occurring amino acid
  misc_feature (274)..(274): Xaa can be any naturally occurring amino acid
  misc_feature (277)..(277): Xaa can be any naturally occurring amino acid
  misc_feature (279)..(279): Xaa can be any naturally occurring amino acid
  misc_feature (281)..(281): Xaa can be any naturally occurring amino acid
  misc_feature (283)..(287): Xaa can be any naturally occurring amino acid
  misc_feature (290)..(290): Xaa can be any naturally occurring amino acid
DRIWLNGREEDVGQPRLQACLRXIRCLARKRRNSRDGDPLPSSLSCKVHVASVNNFPTAAGLASSAAGYACLAYTLARVYGVESDLSXVARRGSGSACRSLYGGFVEWQMGEQADGKDSIARQVAPESHWPELRVLILVVSAEKKLTGSTVGMRASVETSPLLRFRAESVVPARMAEMARCIRXRDFPSFAQLTMKDSNQFHATCLDTFPPISYLNAISWXIIHLVHRFNAHHGDTKVAYTFRGPQMXVNFHPWTKLWXEFCGXLCGTXXPPRXEWXKXFXEXXXXXEAXPP

SEQ ID NO: 702 - protein, 296 aa, human
  misc_feature (264)..(264): Xaa can be any naturally occurring amino acid
  misc_feature (276)..(276): Xaa can be any naturally occurring amino acid
  misc_feature (286)..(286): Xaa can be any naturally occurring amino acid
  misc_feature (292)..(292): Xaa can be any naturally occurring amino acid
  misc_feature (295)..(296): Xaa can be any naturally occurring amino acid
DLEKLEVDLNKSLKENTFLQEQLVELKMLAEEDKRKVSELTSKLKTTDEEFQSLKSSHEKSNKSLEDKSLEFKKLSEELAIQLDICCKKTEALLEAKTNELINISSSKTNAILSRISHCQHRTTKVKEALLIKTCTVSELEAQLRQLTEEQNTLNISFQQATHQLEEKENQIKSMKADIESLVTEKEALQKEGGNQQQAASEKESCITQLKKELSENINAVTLMKEELKEKKVEISSLSKQLTDLNVQLQNSISLSEKEAAIFXTKKSSMMKKNGXLLDQGARFIXLKLTLXERXX

SEQ ID NO: 703 - protein, 242 aa, human [sequence omitted]

SEQ ID NO: 704 - protein, 431 aa, human
  misc_feature (246)..(246): Xaa can be any naturally occurring amino acid
  misc_feature (251)..(251): Xaa can be any naturally occurring amino acid
  misc_feature (283)..(283): Xaa can be any naturally occurring amino acid
  misc_feature (431)..(431): Xaa can be any naturally occurring amino acid
GTEGLLAEKLEALITQTRAKQAATMSEVEWRGRTVPVKIDKVRIFLLGLADNEAAIVQAESEETKERLFESMLSECRDAIQVVREELKPDQKQRDYILEGEPGKVSNLQYLHSYLTYIKLSTAIKRNENMAKGLQRALLQQQPEDDSKRSPRPQDLIRLYDIILQNLVELLQLPGLEEDKAFQKEIGLKTLVFKAYRCFFIAQSYVLVKKWSEALVLYDRVLKYANEVNSDAGAFKNSLKDLPDVXELITXVRSKEVLPAGRSHPCKRRSSNRELLPPSQDIXLWVKRFEISCWTPPLSQASQPCDFHQASAHPCKLLSLTGLNRGLPTLEDNWDENKRAPETPGSLDQDSGFLGGGEIVSILLENPPFIIPSFAPENLTFPLLKKKRGPPRNPIDGPCKNKPPLVFNPARVFLKTLCFAKKKNKSPFPHX

SEQ ID NO: 705 - protein, 247 aa, human
  misc_feature (175)..(175): Xaa can be any naturally occurring amino acid
  misc_feature (190)..(190): Xaa can be any naturally occurring amino acid
  misc_feature (197)..(197): Xaa can be any naturally occurring amino acid
  misc_feature (208)..(209): Xaa can be any naturally occurring amino acid
  misc_feature (211)..(211): Xaa can be any naturally occurring amino acid
  misc_feature (222)..(222): Xaa can be any naturally occurring amino acid
  misc_feature (229)..(229): Xaa can be any naturally occurring amino acid
  misc_feature (234)..(234): Xaa can be any naturally occurring amino acid
  misc_feature (236)..(236): Xaa can be any naturally occurring amino acid
  misc_feature (238)..(238): Xaa can be any naturally occurring amino acid
  misc_feature (241)..(247): Xaa can be any naturally occurring amino acid
ADAWAAPDTDPAGDGCPHPHTVLWPPDIMPPKKDVPVKKPAGPSISKPAAKPAAAGAPPAKTKAEPAVPQAPQKTQEPPVDLSKVVIEFNKDQLEEFKEAFELFDRVGDGKILYSQCGGRDEGPGPEPHQRPRCSRSWGTPRVMSSRGRVDFETFLPMLKAVAKNRGPGREDDGXGGRPVWQDTKTATGXINYQGLXNTFLNVVLAIXXGXGTLGPRRRKHXSNPQEGXYWFKXKXGXSPXXXXXXX

SEQ ID NO: 706 - protein, 406 aa, human
  misc_feature (260)..(260): Xaa can be any naturally occurring amino acid
PTRPGRGREVQPPSPAFPGAQPRRGRGRRGESADGAMREYKVVVLGSGGVGKSALTVQFVTGSFIEKYDPTIEDFYRKEIEVDSSPSVLEILDTAGTEQFASMRDLYIKNGQGFILVYSLVNQQSFQDIKPMRDQIIRVKRYERVPMILVGNKVDLEGEREVSYGEGKALAEEWSCPFMETSAKNKASVDELFAEIVRQMNYAAQPNGDEGCCSACVILGGHRAPAALCAQKPNASDSLNVIYFLLDWRPLCIGQGVLGXPAGLRRPASPASTPCPKGGGPLLPHPTLWGKRGSFAPLKFLPGFRLPYSPLSIATTGRSPRISTPLPLKSSTRIKIGCPIPSLSRSYPADTYSTSPPKPPPSSSVIATLPLLSHATIKSLHSIPPIILTTRTSPYLHHPYTSPLRY

SEQ ID NO: 707 - protein, 257 aa, human
  misc_feature (53)..(53): Xaa can be any naturally occurring amino acid
  misc_feature (194)..(194): Xaa can be any naturally occurring amino acid
  misc_feature (197)..(197): Xaa can be any naturally occurring amino acid
  misc_feature (222)..(222): Xaa can be any naturally occurring amino acid
  misc_feature (230)..(230): Xaa can be any naturally occurring amino acid
  misc_feature (237)..(237): Xaa can be any naturally occurring amino acid
  misc_feature (249)..(250): Xaa can be any naturally occurring amino acid
  misc_feature (257)..(257): Xaa can be any naturally occurring amino acid
AHASAKVLQRLIRSRGKSQMKHLTVQMMAYDKLVQCPPESFDVILDENQLEDXCEHLAEYLEVYWRATHHPAPGPGLLGPPSAIPGLQNQQLLGERGEEHSPLERDSLMPSDEASESSRQAWTGSSQRSSRHLEEDYADAYQDLYQPHRQHTSGLPSANGHDPQDRLLAQDSEHNHSDRNWQRNRPLAQGLLTXSCXPTLAGTGAAGWGGPLQAGGGLDWHXAGTRLSPXNPWPGPXFRAAWGPKVLGXXGDPPHLX

SEQ ID NO: 708 - protein, 293 aa, human
  misc_feature (293)..(293): Xaa can be any naturally occurring amino acid
AHASAAGQQTVEIDLIKPGLFKGTYGSHGLEIVMLSFHGRRARGTKITGDPNIPDLENQRNFNELSRIVLEVRERVRQEQQEGGHEAGEGRGRQGPRESQPSPAQPRAEAPSKGPDGTPGEDGGEPGDAVAAAEQPAQCGQGQPFVLPVGVSSRNEDYPRTCRMCFYGTGLIAGHGFTSPERTPGVFILFDEDRFGFVWLELKSFSLYSRVQATFRNADAPSPQAFDEMLKNIQSLTSPATSLPPHPGWLWGSELPVNRSSMHFGNPAFPERTPRRGAQSSHPPALYVESVTX

SEQ ID NO: 709 - protein, 293 aa, human
AHASGDAHAVDFRGRDAPPSDFRGRGTYDLDFRGRDGSHADFRGRDLSDLDFRAREQSRSDFRNRDVSDLDFRDKDGTQVDFRGRGSGTTDLDFRDRDTPHSDFRGRHRSRTDQDFRGREMGSCMEFKDREMPPVDPNILDYIQPSTQDREHSARTQEKQRPSKNPTLSLRKHPYQHHWKNSPTSPDQLIRNLNPGRGKKAKSHADIKREKQKGICLLLEGKGQLSEETERGSHGLERHARMERAKLSCSVSIVPHHLRWKCWSPMSALLLPTSVSSRTEQALWGIPMALLTS

SEQ ID NO: 710 - protein, 150 aa, human
  misc_feature (150)..(150): Xaa can be any naturally occurring amino acid
ARMVEAFCATWKLTNSQNFDEYMKALGVGFATRQVGNVTKPTVIISQEGDKVVIRTLSTFKNTEISFQLGEEFDETTADDRNCKSVVSLDGDKLVHIQKWDGKETNFVREIKDGKMVMTLTFGDVVAVRHYEKAKCSWSGLGRALQFFCX

SEQ ID NO: 711 - protein, 333 aa, human
  misc_feature (237)..(237): Xaa can be any naturally occurring amino acid
  misc_feature (244)..(244): Xaa can be any naturally occurring amino acid
  misc_feature (251)..(251): Xaa can be any naturally occurring amino acid
  misc_feature (272)..(272): Xaa can be any naturally occurring amino acid
  misc_feature (278)..(278): Xaa can be any naturally occurring amino acid
  misc_feature (284)..(284): Xaa can be any naturally occurring amino acid
  misc_feature (290)..(290): Xaa can be any naturally occurring amino acid
  misc_feature (292)..(292): Xaa can be any naturally occurring amino acid
  misc_feature (295)..(295): Xaa can be any naturally occurring amino acid
  misc_feature (297)..(297): Xaa can be any naturally occurring amino acid
  misc_feature (300)..(301): Xaa can be any naturally occurring amino acid
  misc_feature (305)..(305): Xaa can be any naturally occurring amino acid
  misc_feature (310)..(310): Xaa can be any naturally occurring amino acid
  misc_feature (315)..(316): Xaa can be any naturally occurring amino acid
  misc_feature (318)..(318): Xaa can be any naturally occurring amino acid
  misc_feature (321)..(323): Xaa can be any naturally occurring amino acid
  misc_feature (325)..(326): Xaa can be any naturally occurring amino acid
  misc_feature (328)..(328): Xaa can be any naturally occurring amino acid
  misc_feature (330)..(331): Xaa can be any naturally occurring amino acid
  misc_feature (333)..(333): Xaa can be any naturally occurring amino acid
VIRGPAGNNDCRIYVGNLPPDIRTKDIEDVFYKYGAIRDIDLKNRRGGPPFAFVEFEDPRDAEDAVYGRDGYDYDGYRLRVEFPRSGRGTGRGGGGGGGGGAPRGRYGPPSRRSENRVVVSGLPPSGSWQDLKDHMREAGDVCYADVYRDGTGVVEFVRKEDMTYAVRKLDNTKFRSHEGETAYIRVKVDGPRSPSYGRSRSRSRSRSRSRSRSNSRSRSYSPRRSRGSPRYSPPSXISLSYIXLVTLFCXNPWLYTVFPLFRTIFFIFLIXNCFVQXGAKSVXNCHFLXIXPLXFXKIXXPFPXSFEKXGIFKXXVXKKXXXNXXLXNXXQX

SEQ ID NO: 712 - protein, 354 aa, human
  misc_feature (129)..(129): Xaa can be any naturally occurring amino acid
  misc_feature (147)..(147): Xaa can be any naturally occurring amino acid
  misc_feature (152)..(152): Xaa can be any naturally occurring amino acid
  misc_feature (177)..(177): Xaa can be any naturally occurring amino acid
  misc_feature (181)..(181): Xaa can be any naturally occurring amino acid
  misc_feature (201)..(201): Xaa can be any naturally occurring amino acid
  misc_feature (210)..(210): Xaa can be any naturally occurring amino acid
  misc_feature (215)..(215): Xaa can be any naturally occurring amino acid
  misc_feature (219)..(219): Xaa can be any naturally occurring amino acid
  misc_feature (228)..(228): Xaa can be any naturally occurring amino acid
  misc_feature (234)..(235): Xaa can be any naturally occurring amino acid
  misc_feature (239)..(239): Xaa can be any naturally occurring amino acid
  misc_feature (249)..(250): Xaa can be any naturally occurring amino acid
  misc_feature (252)..(252): Xaa can be any naturally occurring amino acid
  misc_feature (254)..(254): Xaa can be any naturally occurring amino acid
  misc_feature (256)..(256): Xaa can be any naturally occurring amino acid
  misc_feature (258)..(258): Xaa can be any naturally occurring amino acid
  misc_feature (260)..(260): Xaa can be any naturally occurring amino acid
  misc_feature (263)..(263): Xaa can be any naturally occurring amino acid
  misc_feature (276)..(276): Xaa can be any naturally occurring amino acid
  misc_feature (278)..(279): Xaa can be any naturally occurring amino acid
  misc_feature (282)..(282): Xaa can be any naturally occurring amino acid
  misc_feature (286)..(286): Xaa can be any naturally occurring amino acid
  misc_feature (288)..(288): Xaa can be any naturally occurring amino acid
  misc_feature (290)..(291): Xaa can be any naturally occurring amino acid
  misc_feature (296)..(296): Xaa can be any naturally occurring amino acid
  misc_feature (301)..(301): Xaa can be any naturally occurring amino acid
  misc_feature (303)..(303): Xaa can be any naturally occurring amino acid
  misc_feature (305)..(305): Xaa can be any naturally occurring amino acid
  misc_feature (307)..(310): Xaa can be any naturally occurring amino acid
  misc_feature (314)..(314): Xaa can be any naturally occurring amino acid
  misc_feature (317)..(317): Xaa can be any naturally occurring amino acid
  misc_feature (321)..(321): Xaa can be any naturally occurring amino acid
  misc_feature (325)..(326): Xaa can be any naturally occurring amino acid
  misc_feature (328)..(328): Xaa can be any naturally occurring amino acid
  misc_feature (338)..(338): Xaa can be any naturally occurring amino acid
  misc_feature (348)..(348): Xaa can be any naturally occurring amino acid
  misc_feature (353)..(354): Xaa can be any naturally occurring amino acid
DGFVEFDDLRDADDAVYELNGKDLCGERVIVEHARGPRRDGSYGSGRSGYGYRRSGRDKYGPPTRTEYRLIVENLSSRCSWQDLKDYMRQAGEVTYADAHKGRKNEGVIEFVSYSDMKRALEKLDGTEXNGRKIRLVEDKPGSRRRXSYSKXRSHSRSRSRSRHSRKSRSRSGSSKXSHSXSRSRSRSGSRSRSKSRSRSXSRSRSKKEXKQEPXQGQXPQPQPRWQXPQQEQXXAEKXNPKNNDNVGXXIXLXPXHXPXGGXQGAGTRKPHPGPXDXXGRXGKNXPXKXXPQSPXLQPAXKXTXTXXXXGPQXKTXKAGXPPKXXKXGKTLNPSPVXKISLPPPRVXRNPEXX

SEQ ID NO: 713 - protein, 416 aa, human
  misc_feature (388)..(388): Xaa can be any naturally occurring amino acid
  misc_feature (391)..(392): Xaa can be any naturally occurring amino acid
  misc_feature (395)..(395): Xaa can be any naturally occurring amino acid
VEPSDTIENVKAKIQDKEGIPPDQQRLIFAGKQLEDGRTLSDYNIQKESTLHLVLRLRGGMQIFVKTLTGKTITLEVEPSDTIENVKAKIQDKEGIPPDQQRLIFAGKQLEDGRTLSDYNIQKESTLHLVPRLRGGMQIFVKTLTGKTITLEVEPSDTIENVKAKIQDKEGIPPDQQRLIFAGKQLEDGRTLSDYNIQKESTLHLVLRLRGGMQIFVKTLTGKTITLEVEPSDTIENVKAKIQDKEGIPPDQQRLIFAGKQLGDGRTLSDYNIQKESTLHLVLRLRSGMQIFVKTLTGRPSPSKWSPVTHRKCQGKDPRGGIPSDQQRLIFAGNNWKDGRPCLIKNPKKSPWPGLPLEGGGSNSPLKVHQISCLSFQKWWLPKKKKNXIKXXSPXGGGPTRGTQIKIGPRLNPKTP

SEQ ID NO: 714 - protein, 242 aa, human
  misc_feature (242)..(242): Xaa can be any naturally occurring amino acid
DAMKVVKKELVNDDEDIDWVQTEKHVFEQASNHPFLVGLHSCFQTESRLFFVIEYVNGGDLMFHMQRQRKLPEEHARFYSAEISLALNYLHERGIIYRDLKLDNVLLDSEGHIKLTDYGMCKEGLRPGDTTSTFCGTPNYIAPEILRGEDYGFSVDWWALGVLMFEMMAGRSPFDIVGSSDNPDQNTEDYLFQVILEKQIRIPRSLSVKAASVLKSFLNKDPKERLGCHPQQGFADIQGHPX

SEQ ID NO: 715 - protein, 286 aa, human
  misc_feature (215)..(215): Xaa can be any naturally occurring amino acid
  misc_feature (226)..(226): Xaa can be any naturally occurring amino acid
  misc_feature (230)..(230): Xaa can be any naturally occurring amino acid
  misc_feature (256)..(257): Xaa can be any naturally occurring amino acid
  misc_feature (260)..(260): Xaa can be any naturally occurring amino acid
  misc_feature (262)..(262): Xaa can be any naturally occurring amino acid
  misc_feature (274)..(274): Xaa can be any naturally occurring amino acid
  misc_feature (277)..(278): Xaa can be any naturally occurring amino acid
  misc_feature (281)..(283): Xaa can be any naturally occurring amino acid
  misc_feature (285)..(286): Xaa can be any naturally occurring amino acid
DSRSLTIAEFKCKLELLVGSPASCMELELYGVDDKFYSKLDQEDALLGSYPVDDGCRIHVIDHSGARLGEYEDVSRVEKYTISQEAYDQRQDTVRSFLKRSKLGRYNEEERAQQEAEAAQRLAEEKAQASSIPVGSRCEVRAAGQSPRRGTVMYVGLTDFKPGYWIGVRYDEPLGKNDGSVNGKRYFECQAKYGAFVKPAVVTVGDFPEEDYGLXEIHLRNSPASXPSSXTDCPFLCVPHGPFSPEPILILFIFFXXPIXFXRTPAFKFTKPPXKIXXKKXXXKXX

SEQ ID NO: 716 - protein, 247 aa, human
  misc_feature (217)..(217): Xaa can be any naturally occurring amino acid
  misc_feature (229)..(230): Xaa can be any naturally occurring amino acid
  misc_feature (233)..(233): Xaa can be any naturally occurring amino acid
ADAWAEICVRLDLNMLSDSENSQHLELHEPPKAVDKAKSPGVDPKQLAAELQKVSLQQSPLVLSSVVEKGSHVHSGPTSAGSSSVPSPGQPGSPSVSKKKHGSSKPTDGTKVVSHPITGEIQLQINYDLGNLIIHILQARNLVPRDNNGYSDPFVKVYLLPGRGQVMVVQNASAEYKRRTKHVQKSLNPEWNQTVIYKSISMGTAQEENTGRQFGIXDRFSSNDFLWGXXLDXFYLAQAHLDKTSKG

SEQ ID NO: 717 - protein, 232 aa, human
  misc_feature (224)..(232): Xaa can be any naturally occurring amino acid
GDGLGQMSLEFYQKKKSRWPFSDECIPWEVWTVKVHVVALATEQERQICREKVGEKLCEKIINIVEVMNRHEYLPKMPTQSEVDNVFDTGLRDVQPYLYKISFQITDALGTSVTTTMRRLIKDTLALASLDLWELLDGSQTLAFGNCTFGPLGSGTCSGSLVRLGRGSPRWLLGFVVASLRSSFSLLTVQSCLYCLSIALVGSPFFLHCTEEPPLGWGIKLRTXXXXXXXXX

SEQ ID NO: 718 - protein, 314 aa, human
  misc_feature (216)..(216): Xaa can be any naturally occurring amino acid
  misc_feature (230)..(230): Xaa can be any naturally occurring amino acid
  misc_feature (238)..(238): Xaa can be any naturally occurring amino acid
  misc_feature (246)..(246): Xaa can be any naturally occurring amino acid
  misc_feature (248)..(248): Xaa can be any naturally occurring amino acid
  misc_feature (253)..(254): Xaa can be any naturally occurring amino acid
  misc_feature (258)..(258): Xaa can be any naturally occurring amino acid
  misc_feature (262)..(263): Xaa can be any naturally occurring amino acid
  misc_feature (271)..(271): Xaa can be any naturally occurring amino acid
  misc_feature (275)..(275): Xaa can be any naturally occurring amino acid
  misc_feature (280)..(280): Xaa can be any naturally occurring amino acid
  misc_feature (283)..(283): Xaa can be any naturally occurring amino acid
  misc_feature (286)..(286): Xaa can be any naturally occurring amino acid
  misc_feature (288)..(288): Xaa can be any naturally occurring amino acid
  misc_feature (293)..(293): Xaa can be any naturally occurring amino acid
  misc_feature (296)..(296): Xaa can be any naturally occurring amino acid
  misc_feature (298)..(300): Xaa can be any naturally occurring amino acid
  misc_feature (303)..(303): Xaa can be any naturally occurring amino acid
  misc_feature (305)..(306): Xaa can be any naturally occurring amino acid
  misc_feature (314)..(314): Xaa can be any naturally occurring amino acid
GGGAESVTRPLRAASPAPPPRAARAAMSEEKPKEGVKTENDHINLKVAGQDGSVVQFKIKRHTPLSKLMKAYCERQGLSMRQIRFRFDGQPINETDTPAQLEMEDEDTIDVFQQQTGGVPESSLAGHSFRARPQPGPSILALLLNGEHVTMPTTKVSAETRGHSPRFSSLCTSSATQNYICRDESVTIGPIRIVIFVQVKVARYCGVLLCAHLCFXPPPTTFFLTPKNYXPEMFSLFXSGQGDFDXPXVGLAXXPWFXSSNXXKFGCFPPXGGIXTFFGXRLXGGXKXFVKGXKKXVXXXFLXGXXGGIKWLKX

SEQ ID NO: 719 - protein, 283 aa, human
  misc_feature (212)..(212): Xaa can be any naturally occurring amino acid
  misc_feature (218)..(218): Xaa can be any naturally occurring amino acid
  misc_feature (235)..(235): Xaa can be any naturally occurring amino acid
  misc_feature (240)..(240): Xaa can be any naturally occurring amino acid
  misc_feature (244)..(244): Xaa can be any naturally occurring amino acid
  misc_feature (247)..(247): Xaa can be any naturally occurring amino acid
  misc_feature (250)..(251): Xaa can be any naturally occurring amino acid
  misc_feature (253)..(254): Xaa can be any naturally occurring amino acid
  misc_feature (256)..(256): Xaa can be any naturally occurring amino acid
  misc_feature (260)..(260): Xaa can be any naturally occurring amino acid
  misc_feature (267)..(267): Xaa can be any naturally occurring amino acid
  misc_feature (279)..(279): Xaa can be any naturally occurring amino acid
  misc_feature (283)..(283): Xaa can be any naturally occurring amino acid
GLDVTLGPVPEIGGSEAPAPQNKDQKAVDPEDDFQREMSFYRQAQAAVLAVLPRLHQLKVPTKRPTDYFAEMAKSDLQMQKIRQKLQTKQAAMERSEKAKQLRALRKYGKKVQTEVLQKRQQEKAHMMNAIKKYQKGFSDKLDFLEGDQKPLAQHKKAGAKGQQMRKGPSAKRRYKNQKFGFGGKKKGSKWNTRESYDDVSSFRAKTAHGRXLKRPGXERVKETWKTNQREDEEXNPPNXLIQXNPXKGXXTXXFXDPTXDPLLVGXLVGKHFFSIKLXEKIX

SEQ ID NO: 720 - protein, 285 aa, human
  misc_feature (213)..(213): Xaa can be any naturally occurring amino acid
  misc_feature (223)..(223): Xaa can be any naturally occurring amino acid
  misc_feature (231)..(231): Xaa can be any naturally occurring amino acid
  misc_feature (245)..(245): Xaa can be any naturally occurring amino acid
  misc_feature (248)..(248): Xaa can be any naturally occurring amino acid
  misc_feature (257)..(257): Xaa can be any naturally occurring amino acid
  misc_feature (267)..(268): Xaa can be any naturally occurring amino acid
  misc_feature (271)..(271): Xaa can be any naturally occurring amino acid
  misc_feature (274)..(274): Xaa can be any naturally occurring amino acid
  misc_feature (277)..(277): Xaa can be any naturally occurring amino acid
  misc_feature (281)..(283): Xaa can be any naturally occurring amino acid
  misc_feature (285)..(285): Xaa can be any naturally occurring amino acid
VVKSIEGDQRLVERAQRLDQELLQALEKEEKRNPQVVQTSPRHSPHHVVRWVDPTALCEELLLPLENPCQGRARLLLTGLHACGDLSVALLRHFSCCPEVVALASVGCCYMKLSDPGGYPLSQWVAGLPGYELPYRLREGACHALEEYAERLQKAGPGLRTHCYRAALETVIRRARPELRRPGVQDMCSGGYSEWGIPSCHIWLPFRPTWPRXTVWWPSSAWXYCLPHWWXRLFYWTGCCTFRKXGFXMLSSCPIFXPETLSPKNLXXWWXTQXCPXGSRXXXLX

SEQ ID NO: 721 - protein, 393 aa, human
  misc_feature (274)..(274): Xaa can be any naturally occurring amino acid
  misc_feature (278)..(278): Xaa can be any naturally occurring amino acid
  misc_feature (287)..(287): Xaa can be any naturally occurring amino acid
  misc_feature (298)..(298): Xaa can be any naturally occurring amino acid
  misc_feature (300)..(300): Xaa can be any naturally occurring amino acid
  misc_feature (308)..(308): Xaa can be any naturally occurring amino acid
  misc_feature (310)..(310): Xaa can be any naturally occurring amino acid
  misc_feature (312)..(312): Xaa can be any naturally occurring amino acid
  misc_feature (318)..(318): Xaa can be any naturally occurring amino acid
  misc_feature (321)..(321): Xaa can be any naturally occurring amino acid
  misc_feature (323)..(323): Xaa can be any naturally occurring amino acid
  misc_feature (331)..(331): Xaa can be any naturally occurring amino acid
  misc_feature (338)..(338): Xaa can be any naturally occurring amino acid
  misc_feature (342)..(343): Xaa can be any naturally occurring amino acid
  misc_feature (347)..(347): Xaa can be any naturally occurring amino acid
  misc_feature (351)..(352): Xaa can be any naturally occurring amino acid
  misc_feature (356)..(358): Xaa can be any naturally occurring amino acid
  misc_feature (360)..(360): Xaa can be any naturally occurring amino acid
  misc_feature (367)..(372): Xaa can be any naturally occurring amino acid
  misc_feature (374)..(375): Xaa can be any naturally occurring amino acid
  misc_feature (377)..(377): Xaa can be any naturally occurring amino acid
  misc_feature (379)..(379): Xaa can be any naturally occurring amino acid
  misc_feature (382)..(383): Xaa can be any naturally occurring amino acid
  misc_feature (391)..(391): Xaa can be any naturally occurring amino acid
  misc_feature (393)..(393): Xaa can be any naturally occurring amino acid
GPSLTSDLQAQSKGNPEQTPVLKPEEEAPAPEVGASKPEGIDSRPETLHPGRPQPPAEEELCSGKPFDAFTDLKNGSLFAFRGQYCYELDEKAVRPGYPKLIRDVWGIEGPIDAAFTRINCQGKTYLFKGSQYWRFEDGVLDPDYPRNISDGFDGIPDNVDAALALPAHSYSGRERVYFFKGKQYWEYQFQHQPSQEECEGSSLSAVFEHFAMMQRDSWEDIFELLFWGRTSAGTRQPQFISRDWHGVPGQVDAAMAGRIYISGMAPRPLLGQXTKVXASQPQRLPXHNEGHSRGPQXKXPAGHSAPXGXSXFSMKEXTWXPXTMMTTGRXGLGLPLXTHPXXLLFXWEKXXPSHXXXGXGKWEPSXXXXXXGXXPXFXPLXXKKPMGGPXNX

SEQ ID NO: 722 - protein, 326 aa, human
  misc_feature (209)..(209): Xaa can be any naturally occurring amino acid
  misc_feature (220)..(220): Xaa can be any naturally occurring amino acid
  misc_feature (223)..(223): Xaa can be any naturally occurring amino acid
  misc_feature (242)..(242): Xaa can be any naturally occurring amino acid
  misc_feature (245)..(245): Xaa can be any naturally occurring amino acid
  misc_feature (250)..(250): Xaa can be any naturally occurring amino acid
  misc_feature (253)..(255): Xaa can be any naturally occurring amino acid
  misc_feature (262)..(262): Xaa can be any naturally occurring amino acid
  misc_feature (264)..(264): Xaa can be any naturally occurring amino acid
  misc_feature (270)..(270): Xaa can be any naturally occurring amino acid
  misc_feature (272)..(272): Xaa can be any naturally occurring amino acid
  misc_feature (280)..(280): Xaa can be any naturally occurring amino acid
  misc_feature (286)..(286): Xaa can be any naturally occurring amino acid
  misc_feature (290)..(290): Xaa can be any naturally occurring amino acid
  misc_feature (292)..(294): Xaa can be any naturally occurring amino acid
  misc_feature (296)..(296): Xaa can be any naturally occurring amino acid
  misc_feature (298)..(298): Xaa can be any naturally occurring amino acid
  misc_feature (300)..(302): Xaa can be any naturally occurring amino acid
  misc_feature (306)..(306): Xaa can be any naturally occurring amino acid
  misc_feature (308)..(308): Xaa can be any naturally occurring amino acid
  misc_feature (311)..(311): Xaa can be any naturally occurring amino acid
  misc_feature (313)..(313): Xaa can be any naturally occurring amino acid
  misc_feature (315)..(316): Xaa can be any naturally occurring amino acid
  misc_feature (318)..(318): Xaa can be any naturally occurring amino acid
  misc_feature (322)..(322): Xaa can be any naturally occurring amino acid
  misc_feature (325)..(326): Xaa can be any naturally occurring amino acid
AGITPSSSSRTRTPASINATPANINLADLTRAVNALPQNMTSQMFSAIAAVTGQGQNPNATPAQWASSQYGYGGSGGGSSAYHVFPTPAQQPVATPLMTPSYSYTTPSQPITTPQYHQLQASTTPQSAQAQPQPSSSSRQRQQQPKSNSHAAIDWGKMAEQWLQEKEAERRKQKQRLTPRPSPSPMIESTPMSIAGDATPLLDEMDRGXCSSDSGYLGWXKAXLPTASLPAPPFMSIKVAKXVLXWWSTXMGXXXWMALNLXFXCMLGKXSXRSNPPRTXCSWKPXWKGXCXXXRXKXKXXXNKKXFXISXPXPXXKXLPSXGIXX

SEQ ID NO: 723 - protein, 377 aa, human
  misc_feature (274)..(274): Xaa can be any naturally occurring amino acid
  misc_feature (280)..(281): Xaa can be any naturally occurring amino acid
  misc_feature (295)..(295): Xaa can be any naturally occurring amino acid
  misc_feature (299)..(299): Xaa can be any naturally occurring amino acid
  misc_feature (306)..(306): Xaa can be any naturally occurring amino acid
  misc_feature (310)..(311): Xaa can be any naturally occurring amino acid
  misc_feature (313)..(313): Xaa can be any naturally occurring amino acid
  misc_feature (319)..(319): Xaa can be any naturally occurring amino acid
  misc_feature (321)..(321): Xaa can be any naturally occurring amino acid
  misc_feature (323)..(323): Xaa can be any naturally occurring amino acid
  misc_feature (333)..(335): Xaa can be any naturally occurring amino acid
  misc_feature (339)..(339): Xaa can be any naturally occurring amino acid
  misc_feature (345)..(345): Xaa can be any naturally occurring amino acid
  misc_feature (352)..(353): Xaa can be any naturally occurring amino acid
  misc_feature (364)..(364): Xaa can be any naturally occurring amino acid
  misc_feature (371)..(371): Xaa can be any naturally occurring amino acid
  misc_feature (375)..(375): Xaa can be any naturally occurring amino acid
  misc_feature (377)..(377): Xaa can be any naturally occurring amino acid
GYLLCELVSDDPRCRLSLDDRVLSSLVRDTIARVHGTFGAAACSIGFAGARALGEEGNPGGWRDVEGAGAGGRKKGHEWPSPCTVFCKVSLAPGTPSESPKLAERKEGPEGSGALSKPLFTCLTGNFCNWLLNLIGRIKGKLCILPSKSYYMTDYINIIWKKIVKSTPGKPLNSWSTEHMIVNICKYRMSDRGALLSHHLNFPLPCLRLTSGELNADRLNSPKSGETESLLQITEPKCSKTACFSGKGFVGVFSNNGSPPTCSYLLNLVNKAFXFIHSPXXNGVQHSGGFGFSLXPEKXKCPCLKXYFLXXKXALLPQXFXFXQKNLGFFPSXXXGPHXKRGSLXPPPPGVXXIPAPPPGGGKXGPPPPLXFFFXKX

SEQ ID NO: 724 - protein, 404 aa, human
  misc_feature (245)..(245): Xaa can be any naturally occurring amino acid
  misc_feature (256)..(256): Xaa can be any naturally occurring amino acid
  misc_feature (268)..(268): Xaa can be any naturally occurring amino acid
  misc_feature (270)..(270): Xaa can be any naturally occurring amino acid
  misc_feature (279)..(280): Xaa can be any naturally occurring amino acid
  misc_feature (287)..(287): Xaa can be any naturally occurring amino acid
  misc_feature (290)..(290): Xaa can be any naturally occurring amino acid
  misc_feature (293)..(294): Xaa can be any naturally occurring amino acid
  misc_feature (296)..(297): Xaa can be any naturally occurring amino acid
  misc_feature (301)..(302): Xaa can be any naturally occurring amino acid
  misc_feature (304)..(304): Xaa can be any naturally occurring amino acid
  misc_feature (307)..(307): Xaa can be any naturally occurring amino acid
  misc_feature (309)..(310): Xaa can be any naturally occurring amino acid
  misc_feature (313)..(313): Xaa can be any naturally occurring amino acid
  misc_feature (319)..(319): Xaa can be any naturally occurring amino acid
  misc_feature (330)..(330): Xaa can be any naturally occurring amino acid
  misc_feature (334)..(334): Xaa can be any naturally occurring amino acid
  misc_feature (337)..(337): Xaa can be any naturally occurring amino acid
  misc_feature (340)..(340): Xaa can be any naturally occurring amino acid
  misc_feature (343)..(344): Xaa can be any naturally occurring amino acid
  misc_feature (347)..(347): Xaa can be any naturally occurring amino acid
  misc_feature (356)..(356): Xaa can be any naturally occurring amino acid
  misc_feature (360)..(361): Xaa can be any naturally occurring amino acid
  misc_feature (366)..(366): Xaa can be any naturally occurring amino acid
  misc_feature (368)..(368): Xaa can be any naturally occurring amino acid
  misc_feature (370)..(370): Xaa can be any naturally occurring amino acid
  misc_feature (375)..(375): Xaa can be any naturally occurring amino acid
  misc_feature (377)..(377): Xaa can be any naturally occurring amino acid
  misc_feature (380)..(382): Xaa can be any naturally occurring amino acid
  misc_feature (389)..(389): Xaa can be any naturally occurring amino acid
  misc_feature (392)..(392): Xaa can be any naturally occurring amino acid
  misc_feature (394)..(395): Xaa can be any naturally occurring amino acid
  misc_feature (401)..(401): Xaa can be any naturally occurring amino acid
  misc_feature (404)..(404): Xaa can be any naturally occurring amino acid
ACKAVLNPLCQVDYRAKLWACNFCFQRNQFPPAYGGISEVNQPAELMPQFSTIEYVIQRGAQSPLIFLYVVDTCLEEDDLQALKESLQMSLSLLPPDALVGLITFGRMVQVHELSCEGISKSYVFRGTKDLTAKQIQDMLGLTKPAMPMQQARPAQPQEHPFASSRFLQPVHKIDMNLTDLLGELQRDPWPVTQGKRPLRSTGVALSIAVGLLEGTFPNTGARIMLFTGGPPTQGPGMVGWRIKXSYSVLGMIIEXKIMHDSKKATKXLXACSNSCKWXXAMKFMLXALXQTXXLXXKVGXXLXGGXMXXGKXLSKPFXLQAKISQKNFXKEFXEIXKRXLGXXLEXKPPRKKFRXPLAXXKFQKXKXRXVQKKXGXWAXXXKLGPKPXPPXAXXEVHHPXPPX

SEQ ID NO: 725 - protein, 386 aa, human
  misc_feature (279)..(279): Xaa can be any naturally occurring amino acid
  misc_feature (282)..(282): Xaa can be any naturally occurring amino acid
  misc_feature (285)..(285): Xaa can be any naturally occurring amino acid
  misc_feature (292)..(292): Xaa can be any naturally occurring amino acid
  misc_feature (297)..(297): Xaa can be any naturally occurring amino acid
  misc_feature (299)..(300): Xaa can be any naturally occurring amino acid
  misc_feature (305)..(305): Xaa can be any naturally occurring amino acid
  misc_feature (311)..(311): Xaa can be any naturally occurring amino acid
  misc_feature (317)..(317): Xaa can be any naturally occurring amino acid
  misc_feature (319)..(319): Xaa can be any naturally occurring amino acid
  misc_feature (321)..(321): Xaa can be any naturally occurring amino acid
  misc_feature (325)..(325): Xaa can be any naturally occurring amino acid
  misc_feature (328)..(328): Xaa can be any naturally occurring amino acid
  misc_feature (333)..(333): Xaa can be any naturally occurring amino acid
  misc_feature (339)..(339): Xaa can be any naturally occurring amino acid
  misc_feature (349)..(349): Xaa can be any naturally occurring amino acid
  misc_feature (351)..(352): Xaa can be any naturally occurring amino acid
  misc_feature (355)..(355): Xaa can be any naturally occurring amino acid
  misc_feature (359)..(360): Xaa can be any naturally occurring amino acid
  misc_feature (363)..(363): Xaa can be any naturally occurring amino acid
  misc_feature (367)..(369): Xaa can be any naturally occurring amino acid
  misc_feature (371)..(371): Xaa can be any naturally occurring amino acid
  misc_feature (374)..(374): Xaa can be any naturally occurring amino acid
  misc_feature (376)..(378): Xaa can be any naturally occurring amino acid
  misc_feature (381)..(382): Xaa can be any naturally occurring amino acid
  misc_feature (384)..(384): Xaa can be any naturally occurring amino acid
  misc_feature (386)..(386): Xaa can be any naturally occurring amino acid
GPGLIHSAPGLPDTCALLQPPAASAAAAPSMSGPDVETPSAIQICRIMRPDDANVAGNVHGGTILKMIEEAGAIISTRHCNSQNGERCVAALARVERTDFLSPMCIGEVAHVSAEITYTSKHSVEVQVNVMSENILTGAKKLTNKATLWYVPLSLKNVDKVLEVPPVVYSRQEQEEEGRKRYEAQKLERMETKWRNGDIVQPVLNPEPNTVSYSQSSLIHLVGPSDCTLHGFVHGGVTMKLMDEVRRDRGCTPLQDQHRHSFRGTPFNFHDKDQKKAAXFTXSGXMTFTNKXPNIKXLXXPQPCXGNFQKXLPGPPXLXSXKCSXKKXGPFLXPHVQSXKFPLWPKPIXIXXGFXKFFXXLTXIFLXXXQXFLXLXXXVNXXPXPX

SEQ ID NO: 726 - protein, 346 aa, human
  misc_feature (263)..(263): Xaa can be any naturally occurring amino acid
  misc_feature (272)..(272): Xaa can be any naturally occurring amino acid
  misc_feature (275)..(276): Xaa can be any naturally occurring amino acid
  misc_feature (278)..(278): Xaa can be any naturally occurring amino acid
  misc_feature (280)..(280): Xaa can be any naturally occurring amino acid
  misc_feature (284)..(284): Xaa can be any naturally occurring amino acid
  misc_feature (288)..(288): Xaa can be any naturally occurring amino acid
  misc_feature (290)..(290): Xaa can be any naturally occurring amino acid
  misc_feature (298)..(299): Xaa can be any naturally occurring amino acid
  misc_feature (303)..(303): Xaa can be any naturally occurring amino acid
  misc_feature (311)..(312): Xaa can be any naturally occurring amino acid
  misc_feature (316)..(316): Xaa can be any naturally occurring amino acid
  misc_feature (318)..(318): Xaa can be any naturally occurring amino acid
  misc_feature (320)..(322): Xaa can be any naturally occurring amino acid
  misc_feature (325)..(325): Xaa can be any naturally occurring amino acid
  misc_feature (328)..(329): Xaa can be any naturally occurring amino acid
  misc_feature (332)..(332): Xaa can be any naturally occurring amino acid
  misc_feature (337)..(337): Xaa can be any naturally occurring amino acid
  misc_feature (340)..(343): Xaa can be any naturally occurring amino acid
  misc_feature (345)..(346): Xaa can be any naturally occurring amino acid
VQVAGRPGVAGMAEARKRRELLPLIYHHLLRAGYVRAAREVKEQSGQKCFLAQPVTLLDIYTHWQQTSELGRKRKAEEDAALQAKKTRVSDPISTSESSEEEEEAEAETAKATPRLASTNSSVLGADLPSSMKEKAKAETEKAGKTGNSMPHPATGKTVANLLSGKSPRKSAEPSANTTLVSETEEEGSVPAFGAAAKPGMVSAGQADSSSEDTSSSSDETDVEGKPSVKPAQVKASSVSTKESPARKAAPAPGKVGDVTPQXKGGALPPAXRAXXPXKXSKSXEEGXEXRRRPLQGXXTRRXLKNFQVKXXHPCXGXLXXXTHXPWXXGLXLPTRXEPXXXXTXX

SEQ ID NO: 727 - protein, 340 aa, human
  misc_feature (279)..(280): Xaa can be any naturally occurring amino acid
  misc_feature (286)..(286): Xaa can be any naturally occurring amino acid
  misc_feature (297)..(297): Xaa can be any naturally occurring amino acid
  misc_feature (301)..(301): Xaa can be any naturally occurring amino acid
  misc_feature (305)..(305): Xaa can be any naturally occurring amino acid
  misc_feature (308)..(308): Xaa can be any naturally occurring amino acid
  misc_feature (312)..(312): Xaa can be any naturally occurring amino acid
  misc_feature (318)..(320): Xaa can be any naturally occurring amino acid
  misc_feature (323)..(323): Xaa can be any naturally occurring amino acid
  misc_feature (329)..(331): Xaa can be any naturally occurring amino acid
  misc_feature (333)..(333): Xaa can be any naturally occurring amino acid
  misc_feature (335)..(335): Xaa can be any naturally occurring amino acid
  misc_feature (337)..(337): Xaa can be any naturally occurring amino acid
GTEVIQLFPEKGNMGKILPEYLSNWTMEKVRREGVKVMPNAIVQSVGVSSGKLLIKLKDGRKVETDHIVAAVGLEPNVELAKTGGLEIDSDFGGFRVNAELQARSNIWVAGDAACFYDIKLGRRRVEHHDHAVVSGRLAGENMTGAAKPYWHQSMFWSDLGPDVGYEAIGLVDSSLPTVGVFAKATAQDNPKSATEQSGTGIRSESETESEASEITIPPSTPAVPQAPVQGEDYGKGVIFYLRDKVVVGIVLWNIFNRMPIARKIIKDGEQHEDLIEVXXLSTFMXTEAPQWNWQPXAPPXRGQXGKXIFYXQTFLGXXXDQXLEISLXXXLXPXEXSIS

SEQ ID NO: 728 - protein, 371 aa, human
  misc_feature (231)..(231): Xaa can be any naturally occurring amino acid
  misc_feature (270)..(270): Xaa can be any naturally occurring amino acid
  misc_feature (276)..(276): Xaa can be any naturally occurring amino acid
  misc_feature (287)..(287): Xaa can be any naturally occurring amino acid
  misc_feature (293)..(293): Xaa can be any naturally occurring amino acid
  misc_feature (299)..(299): Xaa can be any naturally occurring amino acid
  misc_feature (305)..(306): Xaa can be any naturally occurring amino acid
  misc_feature (310)..(310): Xaa can be any naturally occurring amino acid
  misc_feature (312)..(312): Xaa can be any naturally occurring amino acid
  misc_feature (315)..(315): Xaa can be any naturally occurring amino acid
  misc_feature (317)..(317): Xaa can be any naturally occurring amino acid
  misc_feature (320)..(320): Xaa can be any naturally occurring amino acid
  misc_feature (323)..(323): Xaa can be any naturally occurring amino acid
  misc_feature (330)..(330): Xaa can be any naturally occurring amino acid
  misc_feature (339)..(339): Xaa can be any naturally occurring amino acid
  misc_feature (343)..(344): Xaa can be any naturally occurring amino acid
  misc_feature (349)..(350): Xaa can be any naturally occurring amino acid
  misc_feature (352)..(355): Xaa can be any naturally occurring amino acid
  misc_feature (358)..(358): Xaa can be any naturally occurring amino acid
  misc_feature (360)..(360): Xaa can be any naturally occurring amino acid
  misc_feature (362)..(362): Xaa can be any naturally occurring amino acid
  misc_feature (364)..(366): Xaa can be any naturally occurring amino acid
  misc_feature (368)..(368): Xaa can be any naturally occurring amino acid
AHASAHASATRTGECDCVSGSMAEKRHTRDSEAQRLPDSFKDSPSKGLGPCGWILVAFSFLFTVITFPISIWMCIKIIKEYERAIIFRLGRILQGGAKGPGLFFILPCTDSFIKVDMRTISFDIPPQEILTKDSVTISVDGVVYYRVQNATLAVANITNADSATRLLAQTTLRNVLGTKNLSQILSDREEIAHNMQSTLDDATDAWGIKVERVEIKDVKLPVQLQRAMAAXAEASREARAKVIAAEGEMNASRALKKTSMVITESPAALXLRNPAXTDHHCCKKLKXLSFPLXIKMLQXIIRGKXXPSKXNXKNXPXPSXHEXGGPNPFXSKKKGKGFXFFQXXNWGGXXKXXXXKKXGXKXFXXXKXRKN

SEQ ID NO: 729 - protein, 289 aa, human
  misc_feature (245)..(245): Xaa can be any naturally occurring amino acid
  misc_feature (279)..(279): Xaa can be any naturally occurring amino acid
  misc_feature (282)..(289): Xaa can be any naturally occurring amino acid
ADAWVGPRAALTMTQQGAALQNYNNELVKCIEELCQKREELCRQIQEEEDEKQRLQNEVRQLTEKLARVNENLARKIASRNEFDRTIAETEAAYLKILESSQTLLSVLKREAGNLTKATAPDQKSSGGRDSPDHGQGLPPCAPQLSPSKCVLRASLFFTAAATFPHCLRCREGQVPASTGISDKPRAQPTRGSSLHAHTGYGDGGLQVSSARGLSLWHPHSCPAREALVVAPWGPPHLVPPQPAXAQGKGQEDRGSPSPQNPNLRSHPCGLLIKIIFVXKKXXXXXXXX

SEQ ID NO: 730 - protein, 254 aa, human
  misc_feature (231)..(231): Xaa can be any naturally occurring amino acid
  misc_feature (237)..(237): Xaa can be any naturally occurring amino acid
  misc_feature (241)..(241): Xaa can be any naturally occurring amino acid
  misc_feature (243)..(243): Xaa can be any naturally occurring amino acid
  misc_feature (245)..(245): Xaa can be any naturally occurring amino acid
  misc_feature (251)..(252): Xaa can be any naturally occurring amino acid
  misc_feature (254)..(254): Xaa can be any naturally occurring amino acid
DPQPAAMAAYKLVLIRHGESAWNLENRFSGWYDADLSPAGHEEAKRGGQALRDAGYEFDICFTSVQKRAIRTLWTVLDAIDQMWLPVVRTWRLNERHYGGLTGLNKAETAAKHGEAQVKIWRRSYDVPPPPMEPDHPFYSNISKDRRYADLTEDQLPSCESLKDTIARALPFWNEEIVPQIKEGKRVLIAAHGNSLRGIVKHLEGLSEEAIMELNLPTGIPICLIGQELEXYQAHAXFWGXEXTXPKAMEXXGX

SEQ ID NO: 731 - protein, 159 aa, human
  misc_feature (158)..(159): Xaa can be any naturally occurring amino acid
GWDRRSVANMQLFVRAQELHTFEVTGQETVAQIKAHVASLEGIAPEDQVVLLAGAPLEDEATLGQCGVEALTTLEVAGRMLGGKVHGSLARAGKVRGQTPKVAKQEKKKKKTGRAKRRMQYNRRFVNVVPTFGKKKGPNANSVFCNSGFLKSHLVQSXX

SEQ ID NO: 732 - protein, 387 aa, human
  misc_feature (285)..(285): Xaa can be any naturally occurring amino acid
  misc_feature (289)..(289): Xaa can be any naturally occurring amino acid
  misc_feature (291)..(291): Xaa can be any naturally occurring amino acid
  misc_feature (298)..(298): Xaa can be any naturally occurring amino acid
  misc_feature (307)..(307): Xaa can be any naturally occurring amino acid
  misc_feature (309)..(310): Xaa can be any naturally occurring amino acid
  misc_feature (313)..(313): Xaa can be any naturally occurring amino acid
  misc_feature (316)..(317): Xaa can be any naturally occurring amino acid
  misc_feature (320)..(320): Xaa can be any naturally occurring amino acid
  misc_feature (324)..(324): Xaa can be any naturally occurring amino acid
  misc_feature (334)..(334): Xaa can be any naturally occurring amino acid
  misc_feature (344)..(344): Xaa can be any naturally occurring amino acid
  misc_feature (346)..(346): Xaa can be any naturally occurring amino acid
  misc_feature (349)..(349): Xaa can be any naturally occurring amino acid
  misc_feature (351)..(351): Xaa can be any naturally occurring amino acid
  misc_feature (353)..(356): Xaa can be any naturally occurring amino acid
  misc_feature (361)..(361): Xaa can be any naturally occurring amino acid
  misc_feature (368)..(368): Xaa can be any naturally occurring amino acid
  misc_feature (371)..(371): Xaa can be any naturally occurring amino acid
  misc_feature (376)..(376): Xaa can be any naturally occurring amino acid
  misc_feature (379)..(379): Xaa can be any naturally occurring amino acid
  misc_feature (384)..(384): Xaa can be any naturally occurring amino acid
  misc_feature (386)..(387): Xaa can be any naturally occurring amino acid
ADAWARKDKDQRKQQAMWRVPSDLKMLKRLKTQMAEVRCMKTDVKNTLSEIKSSSAASGDMQTSLFSADQAALAACGTENSGRLQDLGMELLAKSSVANCYIRNSTNKKSNSPKPARSSVAGSLSLRRAVDPGENSRSKGDCQTLSEGSPGSSQSGSRHSSPRALIHGSIGDILPKTEDRQCKALDSDAVVVAVFSGLPAVEKRRKMVTLGANAKGGHLEGLQMTDLENNSETGELQPVLPEGASAAPEEGMSSDSDIECDTENEEQEEHTSVGGFPDSFMVMTXPRMXIXIPVFLMXNKALKISPXYXXKKXEGXXQIXKLTXQATLTLNLLXWGPNCLRQKXNXAFXFXSXXXXNLKRXEGALFSXTPXFLGKXLGXFFYGXKXX

SEQ ID NO: 733 - protein, 409 aa, human
  misc_feature (268)..(268): Xaa can be any naturally occurring amino acid
  misc_feature (288)..(288): Xaa can be any naturally occurring amino acid
  misc_feature (303)..(303): Xaa can be any naturally occurring amino acid
  misc_feature (315)..(315): Xaa can be any naturally occurring amino acid
  misc_feature (318)..(318): Xaa can be any naturally occurring amino acid
  misc_feature (325)..(325): Xaa can be any naturally occurring amino acid
  misc_feature (329)..(329): Xaa can be any naturally occurring amino acid
  misc_feature (334)..(334): Xaa can be any naturally occurring amino acid
  misc_feature (337)..(338): Xaa can be any naturally occurring amino acid
  misc_feature (340)..(341): Xaa can be any naturally occurring amino acid
  misc_feature (345)..(346): Xaa can be any naturally occurring amino acid
  misc_feature (349)..(350): Xaa can be any naturally occurring amino acid
  misc_feature (353)..(353): Xaa can be any naturally occurring amino acid
  misc_feature (355)..(355): Xaa can be any naturally occurring amino acid
  misc_feature (357)..(358): Xaa can be any naturally occurring amino acid
  misc_feature (362)..(363): Xaa can be any naturally occurring amino acid
  misc_feature (366)..(366): Xaa can be any naturally occurring amino acid
  misc_feature (370)..(370): Xaa can be any naturally occurring amino acid
  misc_feature (372)..(372): Xaa can be any naturally occurring amino acid
  misc_feature (376)..(378): Xaa can be any naturally occurring amino acid
  misc_feature (380)..(380): Xaa can be any naturally occurring amino acid
  misc_feature (386)..(387): Xaa can be any naturally occurring amino acid
  misc_feature (393)..(393): Xaa can be any naturally occurring amino acid
  misc_feature (399)..(399): Xaa can be any naturally occurring amino acid
  misc_feature (401)..(404): Xaa can be any naturally occurring amino acid
  misc_feature (406)..(406): Xaa can be any naturally occurring amino acid
  misc_feature (409)..(409): Xaa can be any naturally occurring amino acid
VESVSCSAAAVRTGDMESQRDLSLVPERLQRREQERQLEVERRKQKRQNQEVEKENSHFFVATFARERAAVEELLERAESVERLEEAASRLQGLQKLINDSVFFLAAYDLRQGQEALARLQAALAERRRGLQPKKRFAFKTRGKDAASSTKVDAAPGIPPAVESIQDSPLPKKAEGDLGPSWVCGFSNLESQVLEKRASELHQRDVLLTELSNCTVRLYGNPNTLRLTKAHSCKLLCGPVSTSVFLEDCSDCVLAVACQQLRIHSTKXHPHLPCRPAGPSWKTAVGIXFPPYTWSYPRSKGLXSSGLNRTKITGXMLXILAGPEXGLPXLEYFXEKXXKXXGNNXXPLXXLLXKXFXXEFSXXGPXNYLXPXGFFXXXRXKMKGPXXISIPKXKKKIFXFXXXXKXPPX

SEQ ID NO: 734 - protein, 357 aa, human
  misc_feature (216)..(216): Xaa can be any naturally occurring amino acid
  misc_feature (222)..(222): Xaa can be any naturally occurring amino acid
  misc_feature (240)..(240): Xaa can be any naturally occurring amino acid
  misc_feature (246)..(246): Xaa can be any naturally occurring amino acid
  misc_feature (248)..(248): Xaa can be any naturally occurring amino acid
  misc_feature (252)..(252): Xaa can be any naturally occurring amino acid
  misc_feature (254)..(255): Xaa can be any naturally occurring amino acid
  misc_feature (265)..(265): Xaa can be any naturally occurring amino acid
  misc_feature (270)..(270): Xaa can be any naturally occurring amino acid
  misc_feature (272)..(272): Xaa can be any naturally occurring amino acid
  misc_feature (279)..(279): Xaa can be any naturally occurring amino acid
  misc_feature (281)..(281): Xaa can be any naturally occurring amino acid
  misc_feature (284)..(284): Xaa can be any naturally occurring amino acid
  misc_feature (288)..(288): Xaa can be any naturally occurring amino acid
  misc_feature (290)..(291): Xaa can be any naturally occurring amino acid
  misc_feature (294)..(294): Xaa can be any naturally occurring amino acid
  misc_feature (297)..(297): Xaa can be any naturally occurring amino acid
  misc_feature (301)..(302): Xaa can be any naturally occurring amino acid
  misc_feature (306)..(306): Xaa can be any naturally occurring amino acid
  misc_feature (311)..(311): Xaa can be any naturally occurring amino acid
  misc_feature (324)..(324): Xaa can be any naturally occurring amino acid
  misc_feature (329)..(329): Xaa can be any naturally occurring amino acid
  misc_feature (332)..(332): Xaa can be any naturally occurring amino acid
  misc_feature (334)..(334): Xaa can be any naturally occurring amino acid
  misc_feature (336)..(336): Xaa can be any naturally occurring amino acid
  misc_feature (339)..(339): Xaa can be any naturally occurring amino acid
  misc_feature (343)..(345): Xaa can be any naturally occurring amino acid
  misc_feature (348)..(348): Xaa can be any naturally occurring amino acid
  misc_feature (350)..(350): Xaa can be any naturally occurring amino acid
  misc_feature (353)..(353): Xaa can be any naturally occurring amino acid
  misc_feature (356)..(357): Xaa can be any naturally occurring amino acid
PRVRTSILHNLSHHREGLLAIFKSGGIPALVRMLSSPVESVLFYAITTLHNLLLYQEGAKMAVRLADGLQKMVPLLNKNNPKFLAITTDCLQLLAYGNQESKLIILANGGPQALVQIMRNYSYEKLLWTTSRVLKVLSVCPSNKPAIVEAGGMQALGKHLTSNSPRLVQNCLWTLRNLSDVATKQEGLESVLKILVNQLSVDDVNVLTCATGTLSXLTCNNXKNKTLVTQNSGVEALIHXHPACWXGXKITXPXXLRFCATSITXQPRPXNXPKNSVRXQXMGXPTHXKXXQPXPTXWAIXXKANXLGLIXKIGPWGQTKHCPXERNGXSPXSXQXGGXKGPXXXPTXPXFIXKKXX

SEQ ID NO: 735 - protein, 357 aa, human; identical to SEQ ID NO: 734
  misc_feature (216)..(216): Xaa can be any naturally occurring amino acid
  misc_feature (222)..(222): Xaa can be any naturally occurring amino acid
  misc_feature (240)..(240): Xaa can be any naturally occurring amino acid
  misc_feature (246)..(246): Xaa can be any naturally occurring amino acid
  misc_feature (248)..(248): Xaa can be any naturally occurring amino acid
  misc_feature (252)..(252): Xaa can be any naturally occurring amino acid
  misc_feature (254)..(255): Xaa can be any naturally occurring amino acid
  misc_feature (265)..(265): Xaa can be any naturally occurring amino acid
  misc_feature (270)..(270): Xaa can be any naturally occurring amino acid
  misc_feature (272)..(272): Xaa can be any naturally occurring amino acid
  misc_feature (279)..(279): Xaa can be any naturally occurring amino acid
  misc_feature (281)..(281): Xaa can be any naturally occurring amino acid
  misc_feature (284)..(284): Xaa can be any naturally occurring amino acid
  misc_feature (288)..(288): Xaa can be any naturally occurring amino acid
  misc_feature (290)..(291): Xaa can be any naturally occurring amino acid
  misc_feature (294)..(294): Xaa can be any naturally occurring amino acid
  misc_feature (297)..(297): Xaa can be any naturally occurring amino acid
  misc_feature (301)..(302): Xaa can be any naturally occurring amino acid
  misc_feature (306)..(306): Xaa can be any naturally occurring amino acid
  misc_feature (311)..(311): Xaa can be any naturally occurring amino acid
  misc_feature (324)..(324): Xaa can be any naturally occurring amino acid
  misc_feature (329)..(329): Xaa can be any naturally occurring amino acid
  misc_feature (332)..(332): Xaa can be any naturally occurring amino acid
  misc_feature (334)..(334): Xaa can be any naturally occurring amino acid
  misc_feature (336)..(336): Xaa can be any naturally occurring amino acid
  misc_feature (339)..(339): Xaa can be any naturally occurring amino acid
  misc_feature (343)..(345): Xaa can be any naturally occurring amino acid
  misc_feature (348)..(348): Xaa can be any naturally occurring amino acid
  misc_feature (350)..(350): Xaa can be any naturally occurring amino acid
  misc_feature (353)..(353): Xaa can be any naturally occurring amino acid
  misc_feature (356)..(357): Xaa can be any naturally occurring amino acid

SEQ ID NO: 736 - protein, 294 aa, human
  misc_feature (172)..(172): Xaa can be any naturally occurring amino acid
  misc_feature (188)..(189): Xaa can be any naturally occurring amino acid
  misc_feature (195)..(195): Xaa can be any naturally occurring amino acid
  misc_feature (201)..(202): Xaa can be any naturally occurring amino acid
  misc_feature (204)..(206): Xaa can be any naturally occurring amino acid
  misc_feature (212)..(212): Xaa can be any naturally occurring amino acid
  misc_feature (215)..(215): Xaa can be any naturally occurring amino acid
  misc_feature (218)..(218): Xaa can be any naturally occurring amino acid
  misc_feature (220)..(221): Xaa can be any naturally occurring amino acid
  misc_feature (224)..(224): Xaa can be any naturally occurring amino acid
  misc_feature (235)..(235): Xaa can be any naturally occurring amino acid
  misc_feature (245)..(249): Xaa can be any naturally occurring amino acid
  misc_feature (253)..(253): Xaa can be any naturally occurring amino acid
  misc_feature (266)..(267): Xaa can be any naturally occurring amino acid
  misc_feature (274)..(274): Xaa can be any naturally occurring amino acid
  misc_feature (280)..(280): Xaa can be any naturally occurring amino acid
  misc_feature (282)..(282): Xaa can be any naturally occurring amino acid
  misc_feature (290)..(290): Xaa can be any naturally occurring amino acid
  misc_feature (293)..(294): Xaa can be any naturally occurring amino acid
AGGGGAGGGAAAAAVSASPGAPGGRPPAPAQPRVCVRPETPGPAPRRAMSVNMDELRHQVMINQFVLAAGCAADQAKQLLQAAHWQFETALSTFFQETNIPNSHHHHQMMCTPSNTPATPPNFPDALAMFSKLRASEGLQSSNSPMTAAACSPPANFSPFWASSPPSHQAPXIPPSSPTTFHHLHRPXXKWPPGXQHGGAXXKXXXAMDGQXLNXTPXGXXWKXGAPLGLWGTQXSMGGGNPGKXXXXXPKIXWKKFFKKNFCGVXXKKKIFLXPIGFFXKXFLGKFFSXFFXX

SEQ ID NO: 737 - protein, 129 aa, human
  misc_feature (46)..(46): Xaa can be any naturally occurring amino acid
  misc_feature (65)..(65): Xaa can be any naturally occurring amino acid
  misc_feature (68)..(68): Xaa can be any naturally occurring amino acid
  misc_feature (105)..(105): Xaa can be any naturally occurring amino acid
  misc_feature (107)..(107): Xaa can be any naturally occurring amino acid
  misc_feature (116)..(116): Xaa can be any naturally occurring amino acid
  misc_feature (118)..(118): Xaa can be any naturally occurring amino acid
  misc_feature (120)..(120): Xaa can be any naturally occurring amino acid
  misc_feature (124)..(124): Xaa can be any naturally occurring amino acid
  misc_feature (126)..(128): Xaa can be any naturally occurring amino acid
GRVGEHPLSLCEQVAPIIDLMAVSNALFAKLRDFITLRLPPGFPVXIEIPIFHILNARITFGNLXGCXEPVPSVRGSPSSETPSPGSDSSSVSSSSSTTSCRGCXIXPALFEAPRXYXHXGLAXGXXXT

SEQ ID NO: 738 - protein, 332 aa, human
  misc_feature (54)..(54): Xaa can be any naturally occurring amino acid
  misc_feature (265)..(265): Xaa can be any naturally occurring amino acid
  misc_feature (284)..(284): Xaa can be any naturally occurring amino acid
  misc_feature (298)..(298): Xaa can be any naturally occurring amino acid
  misc_feature (308)..(308): Xaa can be any naturally occurring amino acid
  misc_feature (316)..(316): Xaa can be any naturally occurring amino acid
  misc_feature (321)..(322): Xaa can be any naturally occurring amino acid
  misc_feature (324)..(324): Xaa can be any naturally occurring amino acid
  misc_feature (327)..(327): Xaa can be any naturally occurring amino acid
  misc_feature (330)..(330): Xaa can be any naturally occurring amino acid
MRGSHHHHHHGSYLGDTIESSTHASAFRGLNFLGERQAGHEENRNKPQQHLSPXKDPERGGKGKTAATSPTTCVFCPFPPILPTPPAHAAWDLKSVAEGPPNGRGGPGGGMVGGGGHRPHEGPGGGMGNSSGHRPHEGPGGGMGSGHRPHEGPGGSMGGGGGHRPHEGPGGGISGGSGHRPHEGPGGGMGAGGGHRPHEGPGGSMGGSGGHRPHEGPGHGGPHGHRPHDVPGHRGHDHRGPPPHEHRGHDGPGHGGGGHRGHDGXHSHGGDMSNRPVCRHFMMXGNCRYENNCAFYHXGCQWAPPALXTICLPCSXNPCGXXPXSFXLLXLL

SEQ ID NO: 739 - protein, 202 aa, human
  misc_feature (29)..(29): Xaa can be any naturally occurring amino acid
  misc_feature (32)..(32): Xaa can be any naturally occurring amino acid
  misc_feature (34)..(34): Xaa can be any naturally occurring amino acid
  misc_feature (36)..(37): Xaa can be any naturally occurring amino acid
  misc_feature (39)..(39): Xaa can be any naturally occurring amino acid
  misc_feature (44)..(44): Xaa can be any naturally occurring amino acid
  misc_feature (51)..(51): Xaa can be any naturally occurring amino acid
  misc_feature (53)..(56): Xaa can be any naturally occurring amino acid
  misc_feature (59)..(59): Xaa can be any naturally occurring amino acid
  misc_feature (67)..(70): Xaa can be any naturally occurring amino acid
  misc_feature (72)..(72): Xaa can be any naturally occurring amino acid
  misc_feature (75)..(75): Xaa can be any naturally occurring amino acid
  misc_feature (79)..(80): Xaa can be any naturally occurring amino acid
  misc_feature (86)..(86): Xaa can be any naturally occurring amino acid
  misc_feature (90)..(90): Xaa can be any naturally occurring amino acid
  misc_feature (92)..(92): Xaa can be any naturally occurring amino acid
  misc_feature (95)..(95): Xaa can be any naturally occurring amino acid
  misc_feature (98)..(98): Xaa can be any naturally occurring amino acid
  misc_feature (104)..(104): Xaa can be any naturally occurring amino acid
  misc_feature (108)..(108): Xaa can be any naturally occurring amino acid
  misc_feature (117)..(117): Xaa can be any naturally occurring amino acid
  misc_feature (120)..(120): Xaa can be any naturally occurring amino acid
  misc_feature (122)..(122): Xaa can be any naturally occurring amino acid
  misc_feature (124)..(124): Xaa can be any naturally occurring amino acid
  misc_feature (127)..(127): Xaa can be any naturally occurring amino acid
  misc_feature (129)..(129): Xaa can be any naturally occurring amino acid
  misc_feature (134)..(135): Xaa can be any naturally occurring amino acid
  misc_feature (138)..(138): Xaa can be any naturally occurring amino acid
  misc_feature (148)..(148): Xaa can be any naturally occurring amino acid
  misc_feature (150)..(150): Xaa can be any naturally occurring amino acid
  misc_feature (153)..(153): Xaa can be any naturally occurring amino acid
  misc_feature (155)..(155): Xaa can be any naturally occurring amino acid
  misc_feature (164)..(164): Xaa can be any naturally occurring amino acid
  misc_feature (167)..(168): Xaa can be any naturally occurring amino acid
  misc_feature (175)..(175): Xaa can be any naturally occurring amino acid
  misc_feature (177)..(177): Xaa can be any naturally occurring amino acid
  misc_feature (186)..(187): Xaa can be any naturally occurring amino acid
  misc_feature (191)..(191): Xaa can be any naturally occurring amino acid
  misc_feature (195)..(195): Xaa can be any naturally occurring amino acid
  misc_feature (201)..(201): Xaa can be any naturally occurring amino acid
MRGSHHHHHHGSYLGDTIESSTHASGEGXPRXLXTXXLXPLLPXKTDPPVXAXXXXRVXCPPPTPSXXXXRXDFXNGLXXLVDPSXRHPXLXGLXTLXLARSTXELSXDKIFSTGKXCKXCXFXRWXRXAADGXXGTXKPCRGVLPLXVXSPXSXQGLCSTTRXQRXXRNPGSSXCXRCPGLKSVXXNSLXETLXPVPGSXS

SEQ ID NO: 740 - protein, 331 aa, human
  misc_feature (179)..(179): Xaa can be any naturally occurring amino acid
  misc_feature (257)..(257): Xaa can be any naturally occurring amino acid
  misc_feature (267)..(267): Xaa can be any naturally occurring amino acid
  misc_feature (271)..(271): Xaa can be any naturally occurring amino acid
  misc_feature (278)..(279): Xaa can be any naturally occurring amino acid
  misc_feature (282)..(282): Xaa can be any naturally occurring amino acid
  misc_feature (286)..(286): Xaa can be any naturally occurring amino acid
  misc_feature (288)..(289): Xaa can be any naturally occurring amino acid
  misc_feature (291)..(291): Xaa can be any naturally occurring amino acid
  misc_feature (293)..(293): Xaa can be any naturally occurring amino acid
  misc_feature (299)..(299): Xaa can be any naturally occurring amino acid
  misc_feature (304)..(304): Xaa can be any naturally occurring amino acid
  misc_feature (306)..(306): Xaa can be any naturally occurring amino acid
  misc_feature (308)..(309): Xaa can be any naturally occurring amino acid
  misc_feature (311)..(312): Xaa can be any naturally occurring amino acid
  misc_feature (314)..(315): Xaa can be any naturally occurring amino acid
  misc_feature (318)..(321): Xaa can be any naturally occurring amino acid
  misc_feature (324)..(325): Xaa can be any naturally occurring amino acid
  misc_feature (328)..(328): Xaa can be any naturally occurring amino acid
  misc_feature (330)..(331): Xaa can be any naturally occurring amino acid
GSGRRGFRARWFLAPGRSSRRPGAGRGAGPRSEARKPEARRGEPPPSTAASLRAFCAPGIPEPAVLCAPAQAGARRPPAPQAGPRPPAAPGRRWGQAVAGTTSEGVWEPRVTTAQPWGPRLCTMRTRPPGCSGTSKWDLAEVGCGEGPLNAPHLPQPRVRDRASAPDRSPGSPAAARPXTEVSAVVSPRGLGRGAGPGAQSTFHCARLAAGAGLQLVDAVLTGAVQNGLALVRPPGHHGQKAAANGFCVFNNVAITXAHANKNTGTXSSSXGMCTMAXXSNXSFKXTXXSXIXLGTLLXWALWXFXKXXQXXGXXKAXXXXKLXXKQXGXX

SEQ ID NO: 741 - protein, 331 aa, human
  misc_feature (271)..(273): Xaa can be any naturally occurring amino acid
  misc_feature (276)..(278): Xaa can be any naturally occurring amino acid
  misc_feature (283)..(283): Xaa can be any naturally occurring amino acid
  misc_feature (287)..(287): Xaa can be any naturally occurring amino acid
  misc_feature (290)..(290): Xaa can be any naturally occurring amino acid
  misc_feature (292)..(292): Xaa can be any naturally occurring amino acid
  misc_feature (294)..(299): Xaa can be any naturally occurring amino acid
  misc_feature (305)..(305): Xaa can be any naturally occurring amino acid
  misc_feature (307)..(307): Xaa can be any naturally occurring amino acid
  misc_feature (311)..(312): Xaa can be any naturally occurring amino acid
  misc_feature (315)..(315): Xaa can be any naturally occurring amino acid
  misc_feature (317)..(317): Xaa can be any naturally occurring amino acid
  misc_feature (323)..(323): Xaa can be any naturally occurring amino acid
  misc_feature (325)..(325): Xaa can be any naturally occurring amino acid
  misc_feature (328)..(328): Xaa can be any naturally occurring amino acid
  misc_feature (331)..(331): Xaa can be any naturally occurring amino acid
ADAWGGNKMATETVELHKLKLAELKQECLARGLETKGIKQDLIHRLQAYLEEHAEEEANEEDVLGDETEEEETKPIELPVKEEEPPEKTVDVAAEKKVVKITSEIPQTERMQKRAERFNVPVSLESKKAARAARFGISSVPTKGLSSDNKPMVNLDKLKERAQRFGLNVSSISRKSEDDEKLKKRKERFGIVTSSAGTGTTEDTEAKKRKRAERFGIAKVPDTFCSPVFSISLLLLGHIYAMHSHVPTSCLAMREHVPQVHPTAAAVLIAXXXLRXXXFVFDXVACXKKXGXEXXXXXXKKGRPXPXRGPXXLNXPXLGTPVXKXRNXPPX

SEQ ID NO: 742 - protein, 282 aa, human
DYGGKNCKKPAEYGYVSLGRLGAAKGALHPGCFAPLHPPPPPPPPPAELKAEPGFEPADCKRKEEAGAPGGGAGMAAGFPYALRAYLGYQAVPSGSSGSLSTSSSSSPPGTPSPADAKAPPTACYAGAAPAPSQVKSKAKKTVDKHSDEYKIRRERNNIAVRKSRDKAKMRNLETQHKVLELTAENERLQKKVEQLSRELSTLRNLFKQLPEPLLASSGHCRGPRARPPAGRGDSGERPRPRPRPRPRRRRQNFGTGALGSAGSPSVILIFIIYIYLYFCPN

SEQ ID NO: 743 - protein, 686 aa, human
MQLGEQLLVSSVNLPGAHFYPLESARGGSGGSAGHLPSAAPSPQKLDLDKASKKFSGSLSCEAVSGEPAAASAGAPAAMLSDTDAGDAFASAAAVAKPGPPDGRKGSPCGEEELPSAAAAAAAAAAAAAATARYSMDSLSSERYYLQSPGPQGSELAAPCSLFPYQAAAGAPHGPVYPAPNGARYPYGSMLPPGGFPAAVCPPGRAQFGPGAGAGSGAGGSSGGGGGPGTYQYSQGAPLYGPYPGAAAAGSCGGLGGLGVPGSGFRAHVYLCNRPLWLKFHRHQTEMIITKQGRRMFPFLSFNINGLNPTAHYNVFVEVVLADPNHWRFQGGKWVTCGKADNNMQGNKMYVHPESPNTGSHWMRQEISFGKLKLTNNKGANNNNTQMIVLQSLHKYQPRLHIVEVTEDGVEDLNEPSKTQTFTFSETQFIAVTAYQNTDITQLKIDHNPFAKGFRDNYDSSHQIVPGGRYGVQSFFPEPFVNTLPQARYYNGERTVPQTNGLLSPQQSEEVANPPQRWLVTPVQQPGTNKLDISSYESEYTSSTLLPYGIKSLPLQTSHALGYYPDPTFPAMAGWGGRGSYQRKMAAGLPWTSRTSPTVFSEDQLSKEKVKEEIGSSWIETPPSIKSLDSNDSGVYTSACKRRRLSPSNSSNENSPSIKCEDINAEEYSKDTSKGMGGYYAFYTTP

SEQ ID NO: 744 - protein, 455 aa, human [sequence omitted]

SEQ ID NO: 745 - protein, 211 aa, human
  misc_feature (201)..(201): Xaa can be any naturally occurring amino acid
  misc_feature (203)..(211): Xaa can be any naturally occurring amino acid
DRSPLILGRMASHRLLLLCLAGLVFVSEAGPTGTGESKCPLMVKVLDAVRGSPAINVAVHVFRKAADDTWEPFASGKTSESGELHGLTTEEEFVEGIYKVEIDTKSYWKALGISPFHEHAEVVFTANDSGPRRYTIAALLSPYSYSTTAVVTNPKEGTSPPVDLKDEGWDFIPRVFHFYSSVFTSYAMLEVQAETIKHSCXGXXXXXXXXX

SEQ ID NO: 746 - protein, 410 aa, human
  misc_feature (224)..(224): Xaa can be any naturally occurring amino acid
  misc_feature (272)..(272): Xaa can be any naturally occurring amino acid
  misc_feature (410)..(410): Xaa can be any naturally occurring amino acid
AAKMSQPKKRKLESGGGGEGGEGTEEEDGAEREAALERPRRTKRERDQLYYECYSDVSVHEEMIADRVRTDAYRLGILRNWAALRGKTVLDVGAGTGILSIFCAQAGARRVYAVEASAIWQQAREVVRFNGLEDRVHVLPGPVETVELPEQVDAIVSEWMGYGLLHESMLSSVLHARTKWLKEGGLLLPASAELFIVPISDQMLEWRLGFWSQVKQHYGVDMSXLEGFATRCLMGHSEIVVQGLSGEDVLARPQRFAQLELSRAGLEQELEXRMGRAFRCSCYGSAPMHGFAIWFQVTFPGREAENPWWLSLRLSPGTPWKKALLYLTNPGNGSNPGLPGKSAGAPRETPVPGRVWLQVGTMGKTRTSWENDVPFPIPPQTQLSERHPVPVKVNPPKSEFPLPLTRGEIX

SEQ ID NO: 747 - protein, 427 aa, human
  misc_feature (270)..(270): Xaa can be any naturally occurring amino acid
  misc_feature (285)..(285): Xaa can be any naturally occurring amino acid
  misc_feature (427)..(427): Xaa can be any naturally occurring amino acid
RLGRRRLRRETGDPRLGASAMTAELQQDDAAGAADGHGSSCQMLLNQLREITGIQDPSFLHEALKASNGDITQAVSLLTDERVKEPSQDTVATEPSEVEGSAANKEVLAKVIDLTHDNKDDLQAAIALSLLESPKIQADGRDLNRMHEATSAETKRSKRKRCEVWGENPNPNDWRRVDGWPVGLKNVGNTCWFSAVIQSLFQLPEFRRLVLSYSLPQNVLENCRSHTEKRNIMFMQELQYLFALMMGSNRKFVDPSAALDLLKGAFRSSXETAADVSEFTHKLLXWLEDAFQLAVNVNSPRTNLKINGAAGLWYFTERVREGNPFVQNLRQYLFRTVIHFKQRFRPMVEGKFNLLPPTIREKRKKPCLQTTPRVTFHPHNEHPTPGPQKNPKPEFPKIYRRHSAVSSLTNTSPIHPQHPTEPAYKHX

SEQ ID NO: 748 - protein, 373 aa, human
  misc_feature (279)..(279): Xaa can be any naturally occurring amino acid
  misc_feature (281)..(281): Xaa can be any naturally occurring amino acid
  misc_feature (283)..(283): Xaa can be any naturally occurring amino acid
  misc_feature (288)..(288): Xaa can be any naturally occurring amino acid
  misc_feature (305)..(305): Xaa can be any naturally occurring amino acid
  misc_feature (308)..(308): Xaa can be any naturally occurring amino acid
  misc_feature (312)..(313): Xaa can be any naturally occurring amino acid
  misc_feature (316)..(316): Xaa can be any naturally occurring amino acid
  misc_feature (329)..(329): Xaa can be any naturally occurring amino acid
  misc_feature (331)..(331): Xaa can be any naturally occurring amino acid
  misc_feature (334)..(334): Xaa can be any naturally occurring amino acid
  misc_feature (336)..(336): Xaa can be any naturally occurring amino acid
  misc_feature (340)..(340): Xaa can be any naturally occurring amino acid
  misc_feature (343)..(343): Xaa can be any naturally occurring amino acid
  misc_feature (350)..(350): Xaa can be any naturally occurring amino acid
  misc_feature (352)..(352): Xaa can be any naturally occurring amino acid
  misc_feature (354)..(354): Xaa can be any naturally occurring amino acid
  misc_feature (361)..(363): Xaa can be any naturally occurring amino acid
  misc_feature (365)..(365): Xaa can be any naturally occurring amino acid
  misc_feature (367)..(367): Xaa can be any naturally occurring amino acid
  misc_feature (371)..(371): Xaa can be any naturally occurring amino acid
  misc_feature (373)..(373): Xaa can be any naturally occurring amino acid
GSTALFRTQTTAAAVPRMVIRVYIASSSGSTAIKKKQQDVLGFLEANKIGFEEKDIAANEENRKWMRENVPENSRPATGYPLPPQIFNESQYRGDYDAFFEARENNAVYAFLGLTAPPGSKEAEVQAKQQATLSTVLASKMSLHCFYKIAELALLQKKACNNRLVGFSHANIQNEYKIKITLWLWGEWDINIKLYVDIVEIVLLPAKPSCIHQFYKENTLPSFCHYYGNLSVSAALHKGEREITCLSFLSCLINFHEQEYVPFCYITAIKKFLQVMFMXCXRXNFLSXLKHSHSFVNETSTYTPXFSXLLNXXLSXAISGIKKKILLPXQXQKXLXGEKXPCXTPPLEGXDXSXFLCPREXXXGXSXKGGXQX

SEQ ID NO: 749 - protein, 316 aa, human
  misc_feature (252)..(252): Xaa can be any naturally occurring amino acid
  misc_feature (258)..(259): Xaa can be any naturally occurring amino acid
  misc_feature (261)..(261): Xaa can be any naturally occurring amino acid
  misc_feature (268)..(268): Xaa can be any naturally occurring amino acid
  misc_feature (278)..(282): Xaa can be any naturally occurring amino acid
  misc_feature (286)..(286): Xaa can be any naturally occurring amino acid
  misc_feature (289)..(289): Xaa can be any naturally occurring amino acid
  misc_feature (291)..(291): Xaa can be any naturally occurring amino acid
  misc_feature (298)..(300): Xaa can be any naturally occurring amino acid
  misc_feature (310)..(316): Xaa can be any naturally occurring amino acid
AQTHPEQPGSEASTQPIAGTQTVPQTDEAAQTDSQPLHPSDPTEKQQPKRLHVSNIPFRFRDPDLRQMFGQFGKILDVEIIFNERGSKVGAARSCRLTAPAVGPARLTCEMCVSFLESFAPEDPATRGFGFVTFETSSDADRAREKLNGTIVEGRKIEVNNATARVMTNKKTGNPYTNGWKLNPVVGAVYGPEFYAVTGFPYPTTGTAVAYRGAHLRGRGRAVYNTFRAAPPPPPIPTYGAVVYQDGFYGAXIYGGYXXYXYAQPAAXAAAYSDSYGXXXXXADPXHSXPXGPAGNLXXXEPCETFPRFXXXXXXX

SEQ ID NO: 750 - protein, 342 aa, human
  misc_feature (257)..(257): Xaa can be any naturally occurring amino acid
  misc_feature (259)..(259): Xaa can be any naturally occurring amino acid
  misc_feature (266)..(266): Xaa can be any naturally occurring amino acid
  misc_feature (268)..(268): Xaa can be any naturally occurring amino acid
  misc_feature (271)..(271): Xaa can be any naturally occurring amino acid
  misc_feature (273)..(273): Xaa can be any naturally occurring amino acid
  misc_feature (280)..(280): Xaa can be any naturally occurring amino acid
  misc_feature (285)..(285): Xaa can be any naturally occurring amino acid
  misc_feature (290)..(291): Xaa can be any naturally occurring amino acid
  misc_feature (293)..(294): Xaa can be any naturally occurring amino acid
  misc_feature (297)..(298): Xaa can be any naturally occurring amino acid
  misc_feature (301)..(303): Xaa can be any naturally occurring amino acid
  misc_feature (307)..(307): Xaa can be any naturally occurring amino acid
  misc_feature (318)..(318): Xaa can be any naturally occurring amino acid
  misc_feature (320)..(320): Xaa can be any naturally occurring amino acid
  misc_feature (322)..(322): Xaa can be any naturally occurring amino acid
  misc_feature (324)..(327): Xaa can be any naturally occurring amino acid
  misc_feature (331)..(331): Xaa can be any naturally occurring amino acid
  misc_feature (335)..(335): Xaa can be any naturally occurring amino acid
  misc_feature (337)..(339): Xaa can be any naturally occurring amino acid
  misc_feature (342)..(342): Xaa can be any naturally occurring amino acid
ADAWVRLKGLGCQTLGPHNPTPPPSLDMFAEELAEEELETPTPTQRGEAESRGDGLVDVMWEYKWENTGDAELYGPFTSAQMQTWVSEGYFPDGVYCRKLDPPGGQFYNSKRIDFDLYTACWGPSLVGPSFLDFVEEAPSVSGSEEIGGHFSVNFPFPIKAFSCVLGPWLCWPEARGLLHSPFGLVLVPEYSHEDPPWRCLSGILWPPCLDSACRVNTPQLRCSVLLSQVSCSIPLRSLAFRTLRFFYPCNPPEDRXPXSGCFRPXKXPGXSXKTFGDPXLGGEXWKPSXXSXXPSXXFLXXXGPKXGNKIGPKKPKXPXFXKXXXXFPLXLGFXSXXXAGX

SEQ ID NO: 751 - protein, 356 aa, human
  misc_feature (271)..(271): Xaa can be any naturally occurring amino acid
  misc_feature (284)..(284): Xaa can be any naturally occurring amino acid
  misc_feature (288)..(288): Xaa can be any naturally occurring amino acid
  misc_feature (295)..(295): Xaa can be any naturally occurring amino acid
  misc_feature (299)..(301): Xaa can be any naturally occurring amino acid
  misc_feature (304)..(305): Xaa can be any naturally occurring amino acid
  misc_feature (309)..(309): Xaa can be any naturally occurring amino acid
  misc_feature (316)..(317): Xaa can be any naturally occurring amino acid
  misc_feature (319)..(319): Xaa can be any naturally occurring amino acid
  misc_feature (327)..(327): Xaa can be any naturally occurring amino acid
  misc_feature (331)..(332): Xaa can be any naturally occurring amino acid
  misc_feature (334)..(335): Xaa can be any naturally occurring amino acid
  misc_feature (337)..(338): Xaa can be any naturally occurring amino acid
  misc_feature (343)..(343): Xaa can be any naturally occurring amino acid
  misc_feature (347)..(350): Xaa can be any naturally occurring amino acid
  misc_feature (352)..(352): Xaa can be any naturally occurring amino acid
  misc_feature (354)..(354): Xaa can be any naturally occurring amino acid
  misc_feature (356)..(356): Xaa can be any naturally occurring amino acid
APPAPNLLLTCDRPDLDLRFTIKFQEYSPNLWGHEFRSHHDYYIIATSDGTREGLESLQGGVCLTRGMKVLLRVGQSPRGGAVPRKPVSEMPMERDRGAAHSLEPGKENLPGDPTSNATSRGAEGPLPPPSMPAVAGAAGGLALLLLGVAGAGGAMCWRRRRAKPSESRHPGPGSFGRGGSLGLGGGGGMGPREAEPGELGIALRGGGAADPPFCPHYEKVSGDYGHPVYIVQDGPPQSPPNIYYKVGLLSRGYPESSPSWGAPPVFLVGXPLKSRPPVPPQPXTPPXAVSSPLXDSDXXXPLXXLRWXWVPPLSXXPXSFSLGGQXSPLXXRXXSXXLPPKXGGKXXXXWXPXFX

SEQ ID NO: 752 - protein, 359 aa, human
  misc_feature (247)..(247): Xaa can be any naturally occurring amino acid
  misc_feature (250)..(251): Xaa can be any naturally occurring amino acid
  misc_feature (277)..(277): Xaa can be any naturally occurring amino acid
  misc_feature (289)..(289): Xaa can be any naturally occurring amino acid
  misc_feature (295)..(295): Xaa can be any naturally occurring amino acid
  misc_feature (300)..(300): Xaa can be any naturally occurring amino acid
  misc_feature (302)..(303): Xaa can be any naturally occurring amino acid
  misc_feature (306)..(307): Xaa can be any naturally occurring amino acid
  misc_feature (320)..(320): Xaa can be any naturally occurring amino acid
  misc_feature (322)..(322): Xaa can be any naturally occurring amino acid
  misc_feature (332)..(332): Xaa can be any naturally occurring amino acid
  misc_feature (336)..(336): Xaa can be any naturally occurring amino acid
  misc_feature (344)..(346): Xaa can be any naturally occurring amino acid
  misc_feature (348)..(349): Xaa can be any naturally occurring amino acid
  misc_feature (351)..(351): Xaa can be any naturally occurring amino acid
  misc_feature (356)..(357): Xaa can be any naturally occurring amino acid
  misc_feature (359)..(359): Xaa can be any naturally occurring amino acid
APSKMAARVLRARGAAWAGGLLQRAAPCSLLPRLRTWTSSSNRSREDSWLKSLFVRKVDPRKDAHSNLLAKKETSNLYKLQFHNVKPECLEAYNKICQEVLPKIHEDKHYPCTLVGTWNTWYGEQDQAVHLWRYEGGYPALTEVMNKLRENKEFLEFRKARSDMLLSRKNQLLLEFSFWNEPVPRSGPNIYELRSYQLRPGTMIEWGNYWARAIRFRQDGNEAVGGFFSQIGQLYMVHHLWAYRDLXTRXXHTECSMAQTWLGGIGILHSSTYSGNXNPKIMIPTEKPXPSQKLXKFFMXPXXHFXXSIWPENLIFNWGXQXEKKNHLKVLXPAVXLWGKTLFXXXFXXPXKEKIXXGX

SEQ ID NO: 753 - protein, 327 aa, human
  misc_feature (205)..(205): Xaa can be any naturally occurring amino acid
  misc_feature (217)..(217): Xaa can be any naturally occurring amino acid
  misc_feature (225)..(227): Xaa can be any naturally occurring amino acid
  misc_feature (229)..(229): Xaa can be any naturally occurring amino acid
  misc_feature (234)..(234): Xaa can be any naturally occurring amino acid
  misc_feature (237)..(237): Xaa can be any naturally occurring amino acid
  misc_feature (242)..(242): Xaa can be any naturally occurring amino acid
  misc_feature (244)..(244): Xaa can be any naturally occurring amino acid
  misc_feature (250)..(250): Xaa can be any naturally occurring amino acid
  misc_feature (256)..(257): Xaa can be any naturally occurring amino acid
  misc_feature (259)..(259): Xaa can be any naturally occurring amino acid
  misc_feature (266)..(268): Xaa can be any naturally occurring amino acid
  misc_feature (273)..(273): Xaa can be any naturally occurring amino acid
  misc_feature (275)..(275): Xaa can be any naturally occurring amino acid
  misc_feature (277)..(279): Xaa can be any naturally occurring amino acid
  misc_feature (281)..(281): Xaa can be any naturally occurring amino acid
  misc_feature (286)..(286): Xaa can be any naturally occurring amino acid
  misc_feature (288)..(288): Xaa can be any naturally occurring amino acid
  misc_feature (291)..(291): Xaa can be any naturally occurring amino acid
  misc_feature (295)..(295): Xaa can be any naturally occurring amino acid
  misc_feature (303)..(303): Xaa can be any naturally occurring amino acid
  misc_feature (309)..(309): Xaa can be any naturally occurring amino acid
  misc_feature (316)..(317): Xaa can be any naturally occurring amino acid
  misc_feature (319)..(320): Xaa can be any naturally occurring amino acid
  misc_feature (324)..(325): Xaa can be any naturally occurring amino acid
  misc_feature (327)..(327): Xaa can be any naturally occurring amino acid
GAAATIDSLASRIEDPQIQAHWSNINDVYESSVKVLITSQGYEQICKSIQLQLNIGVEQIRVVHRDGRVITLSYQEQELQDFLLSQMSQHQVHAVQQLAKVMGWQVLSFSNHVGLGPIESIGNASAITVASPSGDYAISVRNGPESGSKIMVQFPRNQCKDLPKSDVLQDNKWSHLRGPFKEVQWNKMEGRNFVYKMELLMSALXPCLLFFPKVSRXFPETFDLXXXAXSTISXKKXYLPKXCXFLKIIXKEMFIXXFXTFSLLKXXXAFEMXKXFXXXCXYRMTXMXKKXGFSXPFKITKLXGFPRAXLKKTPPXXGXXQKKXXGX

SEQ ID NO: 754 - protein, 155 aa, human [sequence omitted]

SEQ ID NO: 755 - protein, 245 aa, human
GEGPRLAAAARTGHGVGRRARLACLGEPRVKAAVVLTLASKLKRDDGLKGSRTAATASDSTRRVSVRDKLLVKEVAELEANLPCTCKVHFPDPNKLHCFQLTVTPDEGYYQGGKFQFETEVPDAYNMVPPKVKCLTKIWHPNITETGEICLSLLREHSIDGTGWAPTRTLKDVVWGLNSLFTDLLNFDDPLNIEAAEHHLRDKEDFRNKVDDYIKRYARKGTIAGPWTVLQFVSNMKQQEGAPSP

SEQ ID NO: 756 - protein, 251 aa, human
  misc_feature (162)..(162): Xaa can be any naturally occurring amino acid
  misc_feature (200)..(200): Xaa can be any naturally occurring amino acid
  misc_feature (230)..(231): Xaa can be any naturally occurring amino acid
  misc_feature (251)..(251): Xaa can be any naturally occurring amino acid
WPSSVPVQPEQLASAGFYYVGRNDDVKCFCCDGGLRCWESGDDPWVEHAKWFPRCEFLIRMKGQEFVDEIQGRYPHLLEQLLSTSDTTGEENADPPIIHFGPGESSSEDAVMMNTPVVKPALEMGFNRDLVKQTVQSKILTTGENYKTVNDIVSALLNAEDXKREEEKEKQAEEMASDDLSLIRKNRMALFHNHVCFLSXIIFLRPNVLTGIYYQKHRYLYSERLMIHFXXRMLRHISKLLKNDHMELLIX

SEQ ID NO: 757 - protein, 227 aa, human
  misc_feature (226)..(227): Xaa can be any naturally occurring amino acid
LEDEGSQEKQGRSEGEGKPQGEGKPASQAKPESQPRAAEKRPAEDYVPRKAKRKTDRGTDDSPKDSQEDLQERHLSSEEMMRECGDVSRAQEELRKKQKMGGFHWMQRDVQDPFAPRGQRGVRGVRGGGRGQRGLHDIPYLCLWPSILISLMRILLALLSLVGICQAQCFNLKLILCFRCQSRYQQPFDPTTALYILVEDFHPCAWKRCSWYIVKKNNLKKFAEPXX

SEQ ID NO: 758 - protein, 245 aa, human
  misc_feature (159)..(159): Xaa can be any naturally occurring amino acid
KEKAEAQQVEALPGPSLDQWHRSAGEEEDGPVLTDEQKSRIQAMKPMTKAEWDARQSIIRKVVDPETGRTRLIKGDGEVLEEIVTKERHREINKQATRGDCLAFQMRAGLLPGPPLAKACGRRWRPSLGRFQGASGKPDGCWWPFPRGLVSGPAQSLLXGRGWRLGSPACLAPPSERAALLSYRPPGTKKIKKKKTSGRSYSESYLNYLSLTPVENPEPQTSSGFVKTLGAAGVLYCEIQLPCEI

SEQ ID NO: 759 - protein, 259 aa, human
  misc_feature (216)..(216): Xaa can be any naturally occurring amino acid
  misc_feature (256)..(256): Xaa can be any naturally occurring amino acid
  misc_feature (259)..(259): Xaa can be any naturally occurring amino acid
MYRLAHFSPFLYYQSQELPNGSVKEAPAPTPTSLEVSSPPDTTEEVDHKPKLCRLAKGENGYGFHLNAIRGLPGSFIKEVQKGGPADLAGLEDEDVIIEVNGVNVLDEPYEKVVDRIQSSGKNVTLLVCGKKAYDYFQAKKIPIVSSLADPLDTPPDSKEGIVVESNHDSHMAKERAHSTASHSSSNSEDTEMKQVIALAVYLIAVSGYLIGILSXGMSCDLFTVSLEKNSTGNPSHVFVSVSFCLQALCRSYLCXNRX

SEQ ID NO: 760 - protein, 352 aa, human
  misc_feature (216)..(216): Xaa can be any naturally occurring amino acid
LQALVTEFQETQSQDAKEQVLANLANFAYDPSNYEYLRQLQVLDLFLDSLSEENETLVEFAIGGLCNLCPDRANKEHILHAGGVPLIINCLSSPNEETVLSAITTLMHLSPPGRSFLPELTATPVVQCMLRFSLSASARLRNLAQIFLEDFCSPRQVAEARSRQAHSALGIPLPRSVAPRQRSMETARTWHPYCWRPQSCGRRNGEHILPPCAFSXSERRVFHRKGFTWMKTPGKEEPKSKNRKKSKEPGFGGHSQPNWGPPPQTPAGGKKGQGRTQRFEKVLQNGPKVKKHPPPRKTGISPKQRPGKSPEKKRNPREKNSPRKCGPPPGRGEKAPPGLPRDFWPRGHPVTW

SEQ ID NO: 761 - protein, 353 aa, human
  misc_feature (101)..(101): Xaa can be any naturally occurring amino acid
  misc_feature (112)..(112): Xaa can be any naturally occurring amino acid
  misc_feature (115)..(115): Xaa can be any naturally occurring amino acid
  misc_feature (124)..(125): Xaa can be any naturally occurring amino acid
  misc_feature (353)..(353): Xaa can be any naturally occurring amino acid
PTRPPTRPRPGLLREEESQGRRQARGPGAWLRDAPGRRSPSMGKLHSKPAAVCKRRESPEGDSFAVSAAWARKGIEEWIGRQRCPGGVSGPRQLRLAGTIXRSTRELVGDVXRDXLTEEKEDDXXWKKPLPPNKTDRSYHHLQKNSLIHSTNLSFINQLTSNIPHAIIHQLKLISAHITLTITKDPQPAKTNKTSHHTIESAPIPQTHTQLLQPSPKPNISVINQLQLLYSPISLPLQPNTDIDISHKLTSTKKHNTQTLTPPRKIITNIYNSLTHSLQLQEYRTLLIHTNYSIHTPTKTSTQHHTYKYITPNPYASLLTTTTPYYIYHTIHFPINNTQYKSLIAIQKNYIKX

SEQ ID NO: 762 - protein, 428 aa, human
  misc_feature (170)..(170): Xaa can be any naturally occurring amino acid
  misc_feature (173)..(173): Xaa can be any naturally occurring amino acid
GESSEDIDQMFSTLLGEMDLLTQSLGVDTLPPPDPNPPRAEFNYSVGFKDLNESLNALEDQDLDALMADLVADISEAEQRTIQAQKESLQNQHHSASLQASIFSGAASLGYGTNVAATGISQYEDDLPPPPADPVLDLPLPPPPPEPLSQEEEEAQAKADKIKLALEKLXEAXVKKLVVQVHMNGYSTKSLMLDEPQLARDVLGKLFRETHWDCHVNWCLYEIYPELPIERVFENMKRVLESLSNWPRRPEIILFLEKKEKISGFNPPNFPWFTRGKKKTRGTYGKNGGFKKRKSFFWKKFFGKIFSFSHKGEGVFFFKKRRKKPRKRRLFFFRASGEFFFPPQRKKKNSPKMGGCFKPGKRGPFFWGGPPKKKIKKPPPPIFFFFHTPPLLERAPPKNLLWGGEKKNPNLTGGGERKTHTTRRNTLF

SEQ ID NO: 763 - protein, 430 aa, human
LPNGSLFLPAVGIQDEGIFRCQAMNRNGKETKSNYRVRVYQIPGKPEIVDSASELTAGVPNKVGTCVSEGSYPAGTLSWHLDGKPLVPNEKGVSVKEQTRRHPETGLFTLQSELMVTPARGGDPRPTFSCSFSPGLPRHRALRTAPIQPRVWEPVPLEEVQLVVEPEGGAVAPGGTVTLTCEVPAQPSPQIHWMKDGVPLPPSPQPCADPPYMFSTPHDPPCRVPPPSTHPFLPLPCQHHIHLTTRDRPYYPPRLSSPPPHPPSSLHLSSCPHIPPSTPLLPPLQLSPPLSPSPPTPPLPSPPPPSHYSPYPNTSSPLHPTPSTTPPPTPFPLLNPSQPPRTSPLPSPTLSTTLLPQPSPLALSDTPPLPYLPSPHPPHSPLPLQIFQLSLPPPTLTSPYPNLPFPHTLPPVFIKPISPYPSLSLKRSTS

SEQ ID NO: 764 - protein, 285 aa, human
  misc_feature (285)..(285): Xaa can be any naturally occurring amino acid
KQCHKTFSFSSSLREHETTHTGEKPYECKQCGKTFSFSSSLQRHERTHNAEKPYECKQCGKAFRCSSYFRIHERSHTGEKPYECKQCGKVFIRSSSFRLHERTHTGEKPYECKLCGKTFSFSSSLREHEKIHTGNKPFECKQCGKAFLRSSQIRLHERTHTGEKPYQCKQCGKAFISSSKFRMHERTHTGEKPYRCKQCGKAFRFSSSVRIHERSHTGEKPYECKQCGKAFISSSHFRLHERTHMGEKVEYKQHSEAFGCSSSFIHKRVHTGQKLCEYKHCSKAX

SEQ ID NO: 765 - protein, 435 aa, human
  misc_feature (266)..(266): Xaa can be any naturally occurring amino acid
  misc_feature (371)..(371): Xaa can be any naturally occurring amino acid
  misc_feature (435)..(435): Xaa can be any naturally occurring amino acid
GASEQTRTPASQVPQPGMASGDLYEVERIVDKRKNKKGKWEYLIRWKGYGSTEDTWEPEHHLLHCEEFIDEFNGLHMSKDKRIKSGKQSSTSKLLRDSRGPSVEKLSHRPSDPGKSKGTSHKRKRINPPLAKPKKGYSGKPSSGGDRATKTVSYRTTPSGLQIMPLKKSQNGMENGDAGSEKDERHFGNGSHQPGLDLNDHVGEQDMGECDVNHATLAENGLGSALTNGGLNLHSPVKRKLEAEKDYVFDKRLRYSVRQNESNCRXRDIVVREGKGVHAHPAVPSDLRQCLKPEILKKPRRRLVTPPPTKPIFPPTDMATISYTPPYLSHCLCAGNPPPFPNTSYTSSLPPPHNSSHFTSFLPLFPHFLPXIFPPTGFSRPLHSLPQLSSFNASSTHPFPLHYTPHPHHYLARLSPYLAPTTIPTPHPPPSHPLX

SEQ ID NO: 766 - protein, 149 aa, human
ASTSCEGIHLCAELLGTMASLSLAPVNIFKAGADEERAETARLTSFIGAIAIGDLVKSTLGPKGMDKILLSSGRDASLMVTNDGATILKNIGVDNPAAKVLVDMSRVQDDEVGDGTTSVTVLAAELLREAESLIAKKIHPQTIIAGWRE

SEQ ID NO: 767 - protein, 259 aa, human
  misc_feature (182)..(182): Xaa can be any naturally occurring amino acid
  misc_feature (190)..(190): Xaa can be any naturally occurring amino acid
  misc_feature (196)..(196): Xaa can be any naturally occurring amino acid
  misc_feature (198)..(198): Xaa can be any naturally occurring amino acid
  misc_feature (200)..(201): Xaa can be any naturally occurring amino acid
  misc_feature (203)..(203): Xaa can be any naturally occurring amino acid
  misc_feature (205)..(205): Xaa can be any naturally occurring amino acid
  misc_feature (215)..(215): Xaa can be any naturally occurring amino acid
  misc_feature (218)..(220): Xaa can be any naturally occurring amino acid
  misc_feature (222)..(222): Xaa can be any naturally occurring amino acid
  misc_feature (226)..(227): Xaa can be any naturally occurring amino acid
  misc_feature (230)..(231): Xaa can be any naturally occurring amino acid
  misc_feature (233)..(233): Xaa can be any naturally occurring amino acid
  misc_feature (235)..(235): Xaa can be any naturally occurring amino acid
  misc_feature (237)..(237): Xaa can be any naturally occurring amino acid
  misc_feature (242)..(242): Xaa can be any naturally occurring amino acid
  misc_feature (244)..(244): Xaa can be any naturally occurring amino acid
  misc_feature (249)..(250): Xaa can be any naturally occurring amino acid
  misc_feature (254)..(254): Xaa can be any naturally occurring amino acid
  misc_feature (259)..(259): Xaa can be any naturally occurring amino acid
ADAWAEPSRRGAGAVQAEVSERLAMAGPQQQPPYLHLAELTASQFLEIWKHFDADGNGYIEGKELENFFQELEKARKGSGMMSKSDNFGEKMKEFMQKYDKNSDGKIEMAELAQILPTEENFLLCFRQHVGSSAEFMEAWRKYDTDRSGYIEANELKGFLSDLLKKANRPYDEPKLQEYPQXILRMFDLXRGMPNXAXSXXSXTXCLSRKNFPAXNFXXXKXDPSXXVLXXIXSXFXPTKDXKXGLLLXXALRXGMALX

SEQ ID NO: 768 - protein, 364 aa, human
  misc_feature (240)..(240): Xaa can be any naturally occurring amino acid
  misc_feature (276)..(276): Xaa can be any naturally occurring amino acid
  misc_feature (279)..(279): Xaa can be any naturally occurring amino acid
  misc_feature (282)..(282): Xaa can be any naturally occurring amino acid
  misc_feature (288)..(288): Xaa can be any naturally occurring amino acid
  misc_feature (290)..(290): Xaa can be any naturally occurring amino acid
  misc_feature (302)..(302): Xaa can be any naturally occurring amino acid
  misc_feature (305)..(307): Xaa can be any naturally occurring amino acid
  misc_feature (309)..(309): Xaa can be any naturally occurring amino acid
  misc_feature (317)..(317): Xaa can be any naturally occurring amino acid
  misc_feature (320)..(320): Xaa can be any naturally occurring amino acid
  misc_feature (323)..(323): Xaa can be any naturally occurring amino acid
  misc_feature (325)..(326): Xaa can be any naturally occurring amino acid
  misc_feature (329)..(330): Xaa can be any naturally occurring amino acid
  misc_feature (335)..(335): Xaa can be any naturally occurring amino acid
  misc_feature (341)..(341): Xaa can be any naturally occurring amino acid
  misc_feature (344)..(344): Xaa can be any naturally occurring amino acid
  misc_feature (352)..(352): Xaa can be any naturally occurring amino acid
  misc_feature (359)..(359): Xaa can be any naturally occurring amino acid
  misc_feature (364)..(364): Xaa can be any naturally occurring amino acid
DMGEKPYQCKECGKAFAYTSSLRRHERTHSGKKPYECKQYGEGLSYLISFQTHIRMNSGERPYKCKICGKGFYSAKSFQTHEKTHTGEKRYKCKQCGKAFNLSSSFRYHERIHTGEKPYECKQCGKAFRSASQLRVHGGTHTGEKPYECKECGKAFRSTSHLRVHGRTHTGEKPYECKECGKAFRYVKHLQIHERTEKHIRMPSGERPYKCSICEKGFYSAKSFQTHEKTHTGEKPYECXQCGKAFRCCNSLRYHERDSHWKRNPMSVSNVGKPSXLPXTFXCMKGLXLXRNPYECKPWGKXLQXXXNXPKHGRTPXGKXPYXCXXWGXXLQICXNPSKPXKDXPGKKPFDXRDGKNLXEIPFX

SEQ ID NO: 769 - protein, 256 aa, human
  misc_feature (194)..(194): Xaa can be any naturally occurring amino acid
  misc_feature (202)..(202): Xaa can be any naturally occurring amino acid
  misc_feature (205)..(205): Xaa can be any naturally occurring amino acid
  misc_feature (207)..(207): Xaa can be any naturally occurring amino acid
  misc_feature (209)..(209): Xaa can be any naturally occurring amino acid
  misc_feature (211)..(212): Xaa can be any naturally occurring amino acid
  misc_feature (216)..(216): Xaa can be any naturally occurring amino acid
  misc_feature (221)..(221): Xaa can be any naturally occurring amino acid
  misc_feature (229)..(230): Xaa can be any naturally occurring amino acid
  misc_feature (233)..(234): Xaa can be any naturally occurring amino acid
  misc_feature (236)..(236): Xaa can be any naturally occurring amino acid
  misc_feature (248)..(248): Xaa can be any naturally occurring amino acid
  misc_feature (254)..(256): Xaa can be any naturally occurring amino acid
AHASGEKPYECKECGKAFISRHQLTVHQRVHTGEKPYECKECGKAFRVHVHLTQHRKIHTDVKPYECKECGKTFSRASYLVQHSRIHTGKKPYECKECGKAFSSGSYLVQHQRIHTGEKPYECNKCGKAFTVYGQLIGHQSVHTGEKPFECKECGKAFRLNSFLTEHQRVHTGEKPFKCKKCGKTFRYSSALKXHLRKHMSXIPXSXEXGXXLRVXLKHWXTSGNLCWXXTFXXEXYWQVYSHLKIHXITQKTXXX

SEQ ID NO: 770 - protein, 256 aa, human
  misc_feature (195)..(195): Xaa can be any naturally occurring amino acid
  misc_feature (211)..(211): Xaa can be any naturally occurring amino acid
KCKQCGKAFSLAGSLRRHEATHTGVKPYKCQCGKAFSDLSSFQNHETTHTGEKPYECKECGKAFSCFKYLSQHKRTHTVEKPYECKTCRKAFSHFSNLKVHERIHSGEKPYECKECGKAFSWLTCLLRHERIHTGEKPYECLQCGKAFTRSRFLRGHEKTHTGEKLYECKECGKALSSLRSLHRHKRTHWKDTLXMYGMWENIQYFNFRNXEELTLEKTLMHGNKLKFHFFNTVSPIYAGNGSAPLITMQVLVMHM

SEQ ID NO: 771 - protein, 437 aa, human
  misc_feature (265)..(265): Xaa can be any naturally occurring amino acid
  misc_feature (291)..(291): Xaa can be any naturally occurring amino acid
  misc_feature (301)..(301): Xaa can be any naturally occurring amino acid
  misc_feature (303)..(304): Xaa can be any naturally occurring amino acid
  misc_feature (307)..(308): Xaa can be any naturally occurring amino acid
  misc_feature (312)..(314): Xaa can be any naturally occurring amino acid
  misc_feature (437)..(437): Xaa can be any naturally occurring amino acid
PTRPEKMTVQLEETGKRLQFAESRGPQLEGADSKSWKSIVVTRMYETKLKELETDIAKKNQSITDLKQLVKEATEREQKVNKYNEDLEQQIKILKHVPEGAETEQGLKRELQVLRLANHQLDKEKAELIHQIEANKDQSGAESTIPDADQLKEKIKDLETQLKMSDLEKQHLKEEIKKLKKELENFDPSFFEEIEDLKYNYKEEVKKNILLEEKVKKLSEQLGVELTSPVAASEEFEDEEESPVNFPIYRSPINFVSFNYLLTLXKYTWKAVLRTVVFPSHYLVPLYLDIXIKLYEIFKKXKXXKKXXKKKXXXRGAAARPRADSRRRTLARQKVPLWLLNGSEPTTPLGSEQIPKRKEMANHDALNTGLPQEQGLPSPPPGGWGIPTPPPKKTPRFTPRGTYNGGKIPTLFFGAPFKTPPLLPPLKPYSPATETFX

SEQ ID NO: 772 - protein, 269 aa, human
  misc_feature (247)..(247): Xaa can be any naturally occurring amino acid
  misc_feature (263)..(263): Xaa can be any naturally occurring amino acid
  misc_feature (269)..(269): Xaa can be any naturally occurring amino acid
KDLKSELSGNFEKTILALMKTPVLFDIYEIKEAIKGVGTDEACLIEILASRSNEHIRELNRAYKAEFKKTLEEAIRSDTSGHFQRLLISLSQGNRDESTNVDMSLAQRDAQELYAAGENRLGTDESKFNAVLCSRSRAHLVAVFNEYQRMTGRDIEKSICREMSGDLEEGMLAVVKCLKNTPAFFAERLNKAMRGAGTKDRTLIRIMVSRSETDLLDIRSEYKRMYGKSLYHDISGDTSGDYRKICXSLWWHDQLVLTLPTAXTQCQKX

SEQ ID NO: 773 - protein, 334 aa, human
  misc_feature (241)..(241): Xaa can be any naturally occurring amino acid
  misc_feature (251)..(251): Xaa can be any naturally occurring amino acid
  misc_feature (254)..(254): Xaa can be any naturally occurring amino acid
  misc_feature (256)..(256): Xaa can be any naturally occurring amino acid
  misc_feature (275)..(275): Xaa can be any naturally occurring amino acid
  misc_feature (280)..(280): Xaa can be any naturally occurring amino acid
  misc_feature (290)..(290): Xaa can be any naturally occurring amino acid
  misc_feature (301)..(301): Xaa can be any naturally occurring amino acid
  misc_feature (304)..(307): Xaa can be any naturally occurring amino acid
  misc_feature (317)..(317): Xaa can be any naturally occurring amino acid
  misc_feature (320)..(320): Xaa can be any naturally occurring amino acid
  misc_feature (325)..(328): Xaa can be any naturally occurring amino acid
  misc_feature (330)..(330): Xaa can be any naturally occurring amino acid
  misc_feature (332)..(334): Xaa can be any naturally occurring amino acid
AHASAHASGGLPVLVELLQSETDKVVRAVAIALRNLSLDRRNKDLIGSYAMAELVRNVRNAQAPPRPGACLEEDTVVAVLNTIHEIVSDSLDNARSLLQARGVPALVALVASSQSVREAKAASHVLQTVWSYKELRGTLQKDGWTKARFQSAAATAKGPKGALSPGGFDDSTLPLVDKSLEGEKTGSRDVIPMDALGPDGYSTVDQRERRPRGASSAGEASEKEPLKLDPSRKAPPPGPSXPAVRLVDAVXDAXPXPVDSWVLACLGPGPASCSXGLDRXKRPPTNRAVXLEPPGGRGWHXSPXXXXLGKPSAPNPXPHXINPKXXXXLXKXXX

SEQ ID NO: 774 - protein, 329 aa, human
MTTQQIDLQGPGPWGFRLVGGKDFEQPLAISRVTPGSKAALANLCIGDVITAIDGENTSNMTHLEAQNRIKGCTDNLTLTVARSEHKVWSPLVTEEGKRHPYKMNLASEPQEVLHIGSAHNRSAMPFTASPASSTTARVITNQYNNPAGLYSSENISNFNNALESKTAASGVEANSRPLDHAQPPSSLVIDKESEVYKMLQEKQELNEPPKQSTSFLVLQEILESEEKGDPNKPSGFRSVKAPVTKVAASIGNAQKLPMCDKCGTGIVGVFVKLRDRHRHPECYVCTDCGTNLKQKGHFFVEDQIYCEKHARERVTPPEGYEVVTVFPK

SEQ ID NO: 775 - protein, 267 aa, human
  misc_feature (267)..(267): Xaa can be any naturally occurring amino acid
ADAWAQTWEGRPLLLAQRERKNWGDPGPGGLSLSGGTVCDMGKKTKRTADSSSSEDEEEYVVEKVLDRRVVKGQVEYLLKWKGFSEEHNTWEPEKNLDCPELISEFMKKYKKMKEGENNKPREKSESNKRKSNFSNSADDIKSKKKREQSNDIARGFERGLEPEKIIGATDSCGDLMFLMKWKDTDEADLVLAKEANVKCPQIVIAFYEERLTWHAYPEDAEKQRERNSKELKEGMVSVISLCTYIHLPASSPFYPPLSILNTSIKX

SEQ ID NO: 776 - protein, 290 aa, human
  misc_feature (290)..(290): Xaa can be any naturally occurring amino acid
DVMKDPETRQLVLQTGALVLSDNGICCIDEFDKMNESTRSVLHEVMEQQTLSIAKAGIICQLNARTSVLAAANPIESQWNPKKTTIENIQLPHTLLSRFDLIFLMLDPQDEAYDRRLAHHLVALYYQSEEQAEEELLDMAVLKDYIAYAHSTIMPRLSEEASQALIEAYVDMRKIGSSRGMVSAYPRQLESLIRLAEAHAKVRLSNKVEAIDVEEAKRLHREALKQSATDPRTGIVDISILTTGMSATSRKRKEELAEALKKLILSKGKTPALKYQQLFEDIRGQSDIAX

SEQ ID NO: 777 - protein, 287 aa, human
  misc_feature (287)..(287): Xaa can be any naturally occurring amino acid
EMKALAVEGKRIGKVLDNAIETEKMIEKYESLASDLLEWIEQTIIILNNRKFANSLVGVQQQLQAFNTYRTVEKPPKFTEKGNLEVLLFTIQSKMRANNQKVYMPREGKLISDINKAWERLEKAEHERELALRNELIRQEKLEQLARRFDRKAAMRETWLSENQRLVSQDNFGFDLPAVEAATKKHEAIETDIAAYEERVQAVVAVARELEAENYHDIKRITARKDNVIRLWEYLLELLRARRQRLEMNLGLQKIFQEMLYIMDWMDEMKGASIVSRLWQTLTWCGX

SEQ ID NO: 778 - protein, 288 aa, human
  misc_feature (268)..(268): Xaa can be any naturally occurring amino acid
  misc_feature (272)..(272): Xaa can be any naturally occurring amino acid
  misc_feature (275)..(275): Xaa can be any naturally occurring amino acid
  misc_feature (281)..(283): Xaa can be any naturally occurring amino acid
  misc_feature (286)..(286): Xaa can be any naturally occurring amino acid
  misc_feature (288)..(288): Xaa can be any naturally occurring amino acid
GATAAQQGGYEIPARLRTLHNLVIQYAAQGRYEVAVPLCKQALEDLERTSGRGHPDVATMLNILALVYRDQNKYKEAAHLLNDALSIRESTLGPDHPAVAATLNNLAVLYGKRGKYKEAEPLCQRALEIREKVLGTNHPDVAKQLNNLALLCQNQGKYEAVERYYQRALAIYEGQLGPDNPNVARTKNNLASCYLKQGKYAEAETLYKEILTRAHVQEFGSVDDDHKPIWMHAEEREEMSKSRHHGGWDTLCVWRLVQGLQSEQPPQXTLLXTWXLLYRRXXXLEXAX

SEQ ID NO: 779 - protein, 241 aa, human
  misc_feature (209)..(209): Xaa can be any naturally occurring amino acid
  misc_feature (222)..(222): Xaa can be any naturally occurring amino acid
  misc_feature (224)..(224): Xaa can be any naturally occurring amino acid
  misc_feature (241)..(241): Xaa can be any naturally occurring amino acid
VKVAMIEPGYFKTAVTSKERFLKSFLEIWDRSSPEVKEAYGEKFAADYKKSAEQMEQKCTQDLSLVTNCMEHALIACHPRTRYSAGWDAKLLYLPMSYMPTFLVDAIMYWVSPSPAKALSGWMHGCMDLGCAMRGGVSLGEISGGREPSGQGTNPTSFITSWPFSWEIILLSGDVGRKVSSYAAEKQGPNSAPGCIVTVGGPLRVQASXAILGATTGVGVSXWXEPQPMPLLPAPIRLCVX

SEQ ID NO: 780 - protein, 262 aa, human
  misc_feature (217)..(217): Xaa can be any naturally occurring amino acid
  misc_feature (225)..(225): Xaa can be any naturally occurring amino acid
  misc_feature (240)..(240): Xaa can be any naturally occurring amino acid
  misc_feature (243)..(243): Xaa can be any naturally occurring amino acid
  misc_feature (253)..(253): Xaa can be any naturally occurring amino acid
  misc_feature (262)..(262): Xaa can be any naturally occurring amino acid
KELLSSDAMKEYNRARVYLDENYKSQEHFTALGSFYFLHESLKNIYQFDFKAKKYRKVAGKEIYSDTLESTPMLEKEKFPQDYFPECKWSRKGFIRTRWCIADCAFDLVNIHLFHDASNLVAWETSPSVYSGIRHKALGYVLDRIIDQRFEKVSYFVFGDFNFRLDSKSVVEVGAGFPPALVSCLALCGKQWKERGPLLALSMPSASRDALFKANLXHEKHVLLXAEGSRVNPGCAGLRXPRXAVTCCGLALXARVAHRTAX

SEQ ID NO: 781 - protein, 270 aa, human
  misc_feature (201)..(201): Xaa can be any naturally occurring amino acid
  misc_feature (231)..(231): Xaa can be any naturally occurring amino acid
  misc_feature (245)..(247): Xaa can be any naturally occurring amino acid
  misc_feature (263)..(263): Xaa can be any naturally occurring amino acid
TMAYIMLCRKTSQQEHVYEAARAHAREANDSGETMRVAIFASGCSSDEPTSQNLGNNYSDEPCIGQEYQIIAQINGNYARLLDTVPLDYEFLATEGKSVCKCPIRPGSADIIASVLAFCMAFFPATSLPGPKVSAYQHWSRWESLALPWNLPDASQVSQLLDLALGPSSISAGGFWYSSLNTRGKMPIALGLGHHAYRHYXTLASCHQKTRGRLSSASSEDQLYPESFLFXSGQTAFNFECISQXXXQSAPPLSNVLSLVLIXYLSTQKK

SEQ ID NO: 782 - protein, 276 aa, human
  misc_feature (276)..(276): Xaa can be any naturally occurring amino acid
GKNWRKGRMKLNEKFSEGWRKPNASWKSSCSKNSSDRDKLSLPHKKLERGSWRVWQPRSTLCRTLDKTEEERAKREELERILEENNRKIAEAQAKLAEEQLRIVEEQRKIHEERMKLEQERQRQQKEEQKIILGKGKSRPKLSFSLKTQDIANSELFTKKNGKTLYGSFMLKWFFVFVFVFLICKIWKVSLFGLCSAIPFFFFFSFHVKSLSDHCCILRSDVFFTCLDSILVVGRADHIVKLWMVGFYPHLQSYTLFATSCWFCLFVFLYIKKKKX

SEQ ID NO: 783 - protein, 334 aa, human
  misc_feature (216)..(216): Xaa can be any naturally occurring amino acid
  misc_feature (228)..(228): Xaa can be any naturally occurring amino acid
  misc_feature (241)..(241): Xaa can be any naturally occurring amino acid
  misc_feature (249)..(249): Xaa can be any naturally occurring amino acid
  misc_feature (251)..(251): Xaa can be any naturally occurring amino acid
  misc_feature (258)..(258): Xaa can be any naturally occurring amino acid
  misc_feature (266)..(267): Xaa can be any naturally occurring amino acid
  misc_feature (271)..(271): Xaa can be any naturally occurring amino acid
  misc_feature (275)..(275): Xaa can be any naturally occurring amino acid
  misc_feature (279)..(279): Xaa can be any naturally occurring amino acid
  misc_feature (281)..(282): Xaa can be any naturally occurring amino acid
  misc_feature (290)..(290): Xaa can be any naturally occurring amino acid
  misc_feature (293)..(293): Xaa can be any naturally occurring amino acid
  misc_feature (296)..(298): Xaa can be any naturally occurring amino acid
  misc_feature (306)..(306): Xaa can be any naturally occurring amino acid
  misc_feature (310)..(310): Xaa can be any naturally occurring amino acid
  misc_feature (312)..(313): Xaa can be any naturally occurring amino acid
  misc_feature (319)..(320): Xaa can be any naturally occurring amino acid
  misc_feature (324)..(324): Xaa can be any naturally occurring amino acid
  misc_feature (326)..(328): Xaa can be any naturally occurring amino acid
  misc_feature (331)..(331): Xaa can be any naturally occurring amino acid
  misc_feature (334)..(334): Xaa can be any naturally occurring amino acid
VQSNDEVLAEVTSWDLPPLTDRYRRACQSLGQGEHQQVLQAVELQGLGLSFSACSLALDQAQLTPLLRALKLHTALRELRLAGNRLGDKCVAELVAALGTMPSLALLDLSSNHLGPEGLRQLAMGLPGQATLQSLEELDLSMNPLGDGCGQSLASLLHACPLLSTLRLQACGFGPSFFLSHQTALGSAFQDAEHLKTLSLSYNALGAPALARTLQXLPAGTLLHLKLXSVAAGKGDSDLMXPVFRYLAXEXCALTHLXLSANHLGXXAVKXLCKXLSLXPXXHLTGFVCXPNXLCXXXNSCPPSKXGPKXLXXLSGCPXXGPWXWXXXKKXPQX

SEQ ID NO: 784 - protein, 386 aa, human
  misc_feature (215)..(215): Xaa can be any naturally occurring amino acid
  misc_feature (219)..(225): Xaa can be any naturally occurring amino acid
  misc_feature (240)..(240): Xaa can be any naturally occurring amino acid
  misc_feature (247)..(247): Xaa can be any naturally occurring amino acid
  misc_feature (258)..(258): Xaa can be any naturally occurring amino acid
  misc_feature (265)..(266): Xaa can be any naturally occurring amino acid
  misc_feature (272)..(272): Xaa can be any naturally occurring amino acid
  misc_feature (274)..(274): Xaa can be any naturally occurring amino acid
  misc_feature (281)..(281): Xaa can be any naturally occurring amino acid
  misc_feature (283)..(283): Xaa can be any naturally occurring amino acid
  misc_feature (294)..(294): Xaa can be any naturally occurring amino acid
  misc_feature (298)..(299): Xaa can be any naturally occurring amino acid
  misc_feature (306)..(306): Xaa can be any naturally occurring amino acid
  misc_feature (312)..(312): Xaa can be any naturally occurring amino acid
  misc_feature (315)..(315): Xaa can be any naturally occurring amino acid
  misc_feature (319)..(319): Xaa can be any naturally occurring amino acid
  misc_feature (324)..(324): Xaa can be any naturally occurring amino acid
  misc_feature (326)..(326): Xaa can be any naturally occurring amino acid
  misc_feature (328)..(328): Xaa can be any naturally occurring amino acid
  misc_feature (334)..(334): Xaa can be any naturally occurring amino acid
  misc_feature (339)..(339): Xaa can be any naturally occurring amino acid
  misc_feature (342)..(343): Xaa can be any naturally occurring amino acid
  misc_feature (346)..(347): Xaa can be any naturally occurring amino acid
  misc_feature (353)..(354): Xaa can be any naturally occurring amino acid
  misc_feature (362)..(362): Xaa can be any naturally occurring amino acid
  misc_feature (369)..(369): Xaa can be any naturally occurring amino acid
  misc_feature (371)..(371): Xaa can be any naturally occurring amino acid
  misc_feature (376)..(377): Xaa can be any naturally occurring amino acid
  misc_feature (379)..(379): Xaa can be any naturally occurring amino acid
  misc_feature (386)..(386): Xaa can be any naturally occurring amino acid
GLPKMAEVQVLVLDGRGHLLGRLAAIVAKQVLLGRKVVVVRCEGINISGNFYRNKLKYLAFLRKRMNTNPSRGPYHFRAPSRIFWRTVRGMLPHKTKRGQAALDRLKVFDGIPPPYDKKKRMVVPAALKVVRLKPTRKFAYLGRLAHEVGWKYQAVTATLEEKRKEKAKIHYRKKKQLMRLRKQAEKNVEKKIDKYTEVLKTHGLLVAQRLLIPXKKKXXXXXXXKRAAAPYSESYALAXLGLLLIXPVMTSKLHLDXFKTLGCXXAFLLVXIXASLAKFXEXKGSMEKKNPWXTTVXXIPMASKXILRHFXQLXNVPXNQTVXLXNXGLFKTXKKKNXNFXXPFXXFFPPEXXPPKFLWQXKKGTGKXKXSPFNXXQXKKNFFPX

SEQ ID NO: 785 - protein, 337 aa, human
  misc_feature (47)..(47): Xaa can be any naturally occurring amino acid
  misc_feature (128)..(128): Xaa can be any naturally occurring amino acid
  misc_feature (154)..(154): Xaa can be any naturally occurring amino acid
  misc_feature (169)..(169): Xaa can be any naturally occurring amino acid
  misc_feature (173)..(173): Xaa can be any naturally occurring amino acid
  misc_feature (181)..(181): Xaa can be any naturally occurring amino acid
  misc_feature (188)..(188): Xaa can be any naturally occurring amino acid
  misc_feature (204)..(204): Xaa can be any naturally occurring amino acid
  misc_feature (209)..(209): Xaa can be any naturally occurring amino acid
  misc_feature (211)..(211): Xaa can be any naturally occurring amino acid
  misc_feature (215)..(215): Xaa can be any naturally occurring amino acid
  misc_feature (217)..(217): Xaa can be any naturally occurring amino acid
  misc_feature (221)..(221): Xaa can be any naturally occurring amino acid
  misc_feature (226)..(226): Xaa can be any naturally occurring amino acid
  misc_feature (228)..(229): Xaa can be any naturally occurring amino acid
  misc_feature (242)..(242): Xaa can be any naturally occurring amino acid
  misc_feature (247)..(248): Xaa can be any naturally occurring amino acid
  misc_feature (253)..(253): Xaa can be any naturally occurring amino acid
  misc_feature (260)..(260): Xaa can be any naturally occurring amino acid
  misc_feature (265)..(265): Xaa can be any naturally occurring amino acid
  misc_feature (267)..(268): Xaa can be any naturally occurring amino acid
  misc_feature (273)..(274): Xaa can be any naturally occurring amino acid
  misc_feature (277)..(277): Xaa can be any naturally occurring amino acid
  misc_feature (279)..(279): Xaa can be any naturally occurring amino acid
  misc_feature (282)..(282): Xaa can be any naturally occurring amino acid
  misc_feature (292)..(293): Xaa can be any naturally occurring amino acid
  misc_feature (297)..(299): Xaa can be any naturally occurring amino acid
  misc_feature (301)..(301): Xaa can be any naturally occurring amino acid
  misc_feature (303)..(303): Xaa can be any naturally occurring amino acid
  misc_feature (306)..(306): Xaa can be any naturally occurring amino acid
  misc_feature (309)..(309): Xaa can be any naturally occurring amino acid
  misc_feature (312)..(313): Xaa can be any naturally occurring amino acid
  misc_feature (317)..(318): Xaa can be any naturally occurring amino acid
  misc_feature (321)..(321): Xaa can be any naturally occurring amino acid
  misc_feature (325)..(325): Xaa can be any naturally occurring amino acid
  misc_feature (327)..(327): Xaa can be any naturally occurring amino acid
  misc_feature (330)..(330): Xaa can be any naturally occurring amino acid
  misc_feature (334)..(334): Xaa can be any naturally occurring amino acid
  misc_feature (337)..(337): Xaa can be any naturally occurring amino acid
GFGCEIENNRSSGAFWKYYYDGKDYIEFNKEIPAWVPFDPAAQITKXKWEAEPVYVQRAKAYLEEECPATLRKYLKYSKNILDRQDPPSVVVTSHQAPGEKKKLKCLAYDFYPGKIDVHWTRAGEVQXPELRGDVLHNGNGTYQSWVVVAVPPXDTAPYSCHVQHSSLXQPLXVPWEASEXRVGGNVXSQTQAALPACGSTTEXHMSMXPXGPEXAXWGGXNRRLXLXXRKTGMPVLKYNLXPKKNXXTLEPXPHPPWSXLVRSXKXXPSFPXXKMXNXLKXYFLLRAGPPXXKESXXXSXTXIFXTLXKKXXKLTXXPPXRIVXKXSRXAPAXIFX

SEQ ID NO: 786 - protein, 307 aa, human
  misc_feature (247)..(249): Xaa can be any naturally occurring amino acid
  misc_feature (256)..(256): Xaa can be any naturally occurring amino acid
  misc_feature (258)..(261): Xaa can be any naturally occurring amino acid
  misc_feature (276)..(276): Xaa can be any naturally occurring amino acid
  misc_feature (281)..(281): Xaa can be any naturally occurring amino acid
  misc_feature (288)..(288): Xaa can be any naturally occurring amino acid
  misc_feature (291)..(293): Xaa can be any naturally occurring amino acid
  misc_feature (299)..(300): Xaa can be any naturally occurring amino acid
  misc_feature (302)..(302): Xaa can be any naturally occurring amino acid
  misc_feature (304)..(307): Xaa can be any naturally occurring amino acid
AQQHAPDFPSQGLDLRTAMYSEIQRERADIGGLMARPEYREWNPELIKPKKLLNPVKASRSHQELHRELLMNHRRGLGVDSKPELQRVLEHRRRNQLIKKKKEELEAKRLQCPFEQELLRRQQRLNQLEKPPEKEEDHAPEFIKVRENLRRIATLTSEERELGQLPGSGHCPPWPGQPPSALLYLAALGPRPWDVCDVPTCFCRNVSPQRAWLSLGGWGPAPRFSFQAPSPPAPRGITCTPPCKGFXXXHRSFLWXNXXXXGPLTQAFCSAQAFHXESPRXPGPASPXTPXXXSQKLPXXGXLXXXX

SEQ ID NO: 787 - protein, 293 aa, human
  misc_feature (293)..(293): Xaa can be any naturally occurring amino acid
EKPHECSECGKVFSQRSHLVTHQKIHTGEKPYQCTECEKAFRRRSLLIQRRRIHSGEKPYECKECGKLFMWHTAFLKHQRLHAGEKLEECEKTFSKDEELRGEQKIHQEEKAYWCNQCGRAFQGSSDLIGHQVTHTGEKPYECKECGKTFNQSSDLLRHHRIHSGEKPYVCNKCGKSFRGSSDLIRHHRVHTGEKPYECPECWKAFSQNSHLVSHQRIHTREKPFECSNCGKAFSGWTAFLKHQKLHIGKEFEDCKSLQTGPILIGSRTMQNEKSDGDHILLHYKVLLEKNHX

SEQ ID NO: 788 - protein, 343 aa, human
  misc_feature (226)..(226): Xaa can be any naturally occurring amino acid
  misc_feature (258)..(258): Xaa can be any naturally occurring amino acid
  misc_feature (265)..(265): Xaa can be any naturally occurring amino acid
  misc_feature (270)..(270): Xaa can be any naturally occurring amino acid
  misc_feature (275)..(275): Xaa can be any naturally occurring amino acid
  misc_feature (277)..(278): Xaa can be any naturally occurring amino acid
  misc_feature (281)..(281): Xaa can be any naturally occurring amino acid
  misc_feature (283)..(283): Xaa can be any naturally occurring amino acid
  misc_feature (286)..(286): Xaa can be any naturally occurring amino acid
  misc_feature (296)..(297): Xaa can be any naturally occurring amino acid
  misc_feature (304)..(304): Xaa can be any naturally occurring amino acid
  misc_feature (306)..(306): Xaa can be any naturally occurring amino acid
  misc_feature (308)..(308): Xaa can be any naturally occurring amino acid
  misc_feature (321)..(323): Xaa can be any naturally occurring amino acid
  misc_feature (325)..(325): Xaa can be any naturally occurring amino acid
  misc_feature (333)..(334): Xaa can be any naturally occurring amino acid
  misc_feature (339)..(339): Xaa can be any naturally occurring amino acid
  misc_feature (341)..(341): Xaa can be any naturally occurring amino acid
GETSMDSRLQRIHAEIKNSLKIDNLDVNRCIEALDELASLQVTMQQAQKHTEMITTLKKIRRFKVSQVIMEKSTMLYNKFKNMFLVGEGDSVITQVLNKSLAEQRQHEEANKTKDQGKKGPNKKLEKEQTGSKTLNGGSDAQDGNQPQHNGESNEDSKDNHEASTKKKPSSEERETEISLKDSTLDNVDIPGIRTLEKFVMVFINRLLKVLNFYKHRFDVENLFGXKNPFVLKSKHYRVYLCSINSYIIQMWDKIHLXNVKLLFXTWVVXYFQLXWXXLMXKXKIXQSYIFKTATXXKPLPPFXKXLXGFGHSFLQTLEFXXXGXFPVWGVLXXLPLFXGXKK

SEQ ID NO: 789 - protein, 248 aa, human
DETYCIDNEALYDICFRTLKLTTPTYGDLNHLVSATMSGVTTCLRFPGQLNADLRKLAVNMVPFPRLHFFMPGFAPLTSRGSQQYRALTVPELTQQVFDAKNMMAACDPRHGRYLTVAAVFRGRMSMKEVDEQMLNVQNKNSSYFVEWIPNNVKTAVCDIPPRGLKMAVTFIGNSTAIQELFKRISEQFTAMFRRKAFLHWYTGEGMDEMEFTEAESNMNDLVSEYQQYQDATAEEEEDFGEEAEEEA

SEQ ID NO: 790 - protein, 783 aa, human
MPQVPGGSVKPKIMSPEKSHRVISPSSGYSSQSNTPTALTPVPVFLKSVSPANGKGKPKPKVPERKSSLISSVSISSSSTSLSSSTSTEGSGTMKKLDPAVGSPPAPPPPPVPSPPFPCPADRSPFLPPPPPVTDCSQGSPLPHSPVFPPPPPEALIPFCSPPDWCLSPPRPALSPILPDSPVSLPLPPPLLPSSEPPPAPPLDPKFMKDTRPPFTNSGQPESSRGSLRPPSTKEETSRPPMPLITTEALQMVQLRPVRKNSGAEAAQLSERTAQEQRTPVAPQYHLKPSAFLKSRNSTNEMESESQPASVTSSLPTPAKSSSQGDHGSAAERGGPVSRSPGAPSAGEAEARPSPSTTPLPDSSPSRKPPPISKKPKLFLVVPPPQKDFAVEPAENVSEALRAVPSPTTGEEGSVHSREAKESSAAQAGSHATHPGTSVLEGGAAGSMSPSRVEANVPMVQPDVSPAPKQEEPAENSADTGGDGESCLSQQDGAAGVPETNAAGSSSEACDFLKEDGNDEVMTPSRPRTTEDLFAAIHRSKRKVLGRRDSDDDHSRNHSPSPPVTPTGAAPSLASPKQVGSIQRSIRKSSTSSDNFKALLLKKGSRSDTSARMSAAEMLKNTDPRFQRSRSEPSPDAPESPSSCSPSKNRRAQEEWAKNEGLMPRSLSFSGPRYGRSRTPPSAASSRYSMRNRIQSSPMTVISEGEGEAVEPVDSIARGALGAAEGCSLDGLAREEMDEGGLLCGEGPAASLQPQAPGPVDGTASAEGREPSPQCGGSLSEES

SEQ ID NO: 791 - protein, 241 aa, human
  misc_feature (204)..(204): Xaa can be any naturally occurring amino acid
  misc_feature (215)..(216): Xaa can be any naturally occurring amino acid
  misc_feature (227)..(227): Xaa can be any naturally occurring amino acid
  misc_feature (241)..(241): Xaa can be any naturally occurring amino acid
DPVLCTLVGESPTRLARSADRRASTDLTRKMKPDETPMFDPSLLKEVDWSQNTATFSPAISPTHPGEGLVLRPLCTADLNRGFFKVLGQLTETGVVSPEQFMKSFEHMKKSGDYYVTVVEDVTLGQIVATATLIIEHKFIHSCAKRGRVEDVVVSDECRGKQLGKLLLSTLTLLSKKLNCYKITLECLPQNVGFYKKFGYTVSXENYMCRKFLKXXSLKLSKGLMLXGYTLPRVKYFVLQX

SEQ ID NO: 792 - protein, 313 aa, human
  misc_feature (251)..(251): Xaa can be any naturally occurring amino acid
  misc_feature (283)..(283): Xaa can be any naturally occurring amino acid
  misc_feature (286)..(286): Xaa can be any naturally occurring amino acid
  misc_feature (293)..(293): Xaa can be any naturally occurring amino acid
  misc_feature (295)..(295): Xaa can be any naturally occurring amino acid
  misc_feature (300)..(301): Xaa can be any naturally occurring amino acid
  misc_feature (303)..(304): Xaa can be any naturally occurring amino acid
  misc_feature (306)..(309): Xaa can be any naturally occurring amino acid
  misc_feature (313)..(313): Xaa can be any naturally occurring amino acid
GKKQSDVMRFLLRVRCWQYRQLSALHRAPRPTRPDKARRLGYKAKQGYVIYRIRVRRGGRKRPVPKGATYGKPVHHGVNQLKFARSLQSVAEERAGRHCGALRVLNSYWVGEDSTYKFFEVILIDPFHKAIRRNPDTQWITKPVHKHREMRGLTSAGRKSRGLGKGHKFHHTIGGSRRAAWRRRNTLQLHRYRYKSLNSYLINNLGQSCLLTGVICLLKLVCRCFLNALSNESSAIMFEDNKWWCILFLIXTFLSLLYLIRELYVSVNILCGITGLINSLKGXNNXPCKFVWXMXRNLHXXGXXAXXXXFIFX

SEQ ID NO: 793 - protein, 356 aa, human
  misc_feature (249)..(249): Xaa can be any naturally occurring amino acid
  misc_feature (271)..(271): Xaa can be any naturally occurring amino acid
  misc_feature (283)..(283): Xaa can be any naturally occurring amino acid
  misc_feature (294)..(295): Xaa can be any naturally occurring amino acid
  misc_feature (297)..(299): Xaa can be any naturally occurring amino acid
  misc_feature (301)..(303): Xaa can be any naturally occurring amino acid
  misc_feature (313)..(313): Xaa can be any naturally occurring amino acid
  misc_feature (315)..(315): Xaa can be any naturally occurring amino acid
  misc_feature (317)..(317): Xaa can be any naturally occurring amino acid
  misc_feature (319)..(321): Xaa can be any naturally occurring amino acid
  misc_feature (323)..(323): Xaa can be any naturally occurring amino acid
  misc_feature (329)..(329): Xaa can be any naturally occurring amino acid
  misc_feature (333)..(335): Xaa can be any naturally occurring amino acid
  misc_feature (338)..(338): Xaa can be any naturally occurring amino acid
  misc_feature (343)..(344): Xaa can be any naturally occurring amino acid
  misc_feature (347)..(347): Xaa can be any naturally occurring amino acid
  misc_feature (350)..(350): Xaa can be any naturally occurring amino acid
  misc_feature (353)..(353): Xaa can be any naturally occurring amino acid
  misc_feature (356)..(356): Xaa can be any naturally occurring amino acid
VGPAFRGAPRPGLPRGREWGARTQLRGRVRPEAVCKCILRGLFVCLSAAPRRRRHHFLLRSGQAHKRKAAAARRRPLFLRCPLLQVRGERVNRERGFCLLVSLDREGEKPKTKILKMVYYPELFVWVSQEPFPNKDMEGRLPKGRLPVPKEVNRKKNDETNAASLTPLGSSELRSPRISYLHFFSHLHLYYIWCMGIDEVMVSYMGFFSVIIKYKKKLWDSEPCFREFTVDKVSSNQFLIILTQVKTLXISHCESTFTTLTGGPSGLVRYXNVFHNSNPHRAXTTGPLLPFHSXXPXXXLXXXSPPPPFFFLXNXKXQXXXVXQLAGNXQILXXXPFXGKKKXXKPXFSXGKXTQX

SEQ ID NO: 794 - protein, 352 aa, human
  misc_feature (238)..(238): Xaa can be any naturally occurring amino acid
  misc_feature (267)..(267): Xaa can be any naturally occurring amino acid
  misc_feature (295)..(295): Xaa can be any naturally occurring amino acid
  misc_feature (300)..(300): Xaa can be any naturally occurring amino acid
  misc_feature (304)..(305): Xaa can be any naturally occurring amino acid
  misc_feature (313)..(313): Xaa can be any naturally occurring amino acid
  misc_feature (319)..(319): Xaa can be any naturally occurring amino acid
  misc_feature (321)..(322): Xaa can be any naturally occurring amino acid
  misc_feature (332)..(333): Xaa can be any naturally occurring amino acid
  misc_feature (335)..(335): Xaa can be any naturally occurring amino acid
  misc_feature (339)..(343): Xaa can be any naturally occurring amino acid
  misc_feature (348)..(350): Xaa can be any naturally occurring amino acid
  misc_feature (352)..(352): Xaa can be any naturally occurring amino acid
GLNNSDHDRLHTLVTEHCFPDMTWDIKYKTVRWSFVESLEPSHVVQVRCSSMMNQGNVYGQITVRMHTRQTLAIYDRFGRLMYGQEDVPKDVLEYVVFEKQLTNPYGSWRMHTKIVPPWAPPKQPILKTVMIPGPQLKPEEEYEEAQGEAQKPQLAQKLLGSLGDEAAGSFEVSHSPHAIKRTTFVLSHPAQVFSAVSSSATMTDDWALAGGRYNMAMDTLLFILCLASESRKTVCFXEHWISVFPTAGTVRDNQQHPLCNHRAGIXVNEMLSGCWKNFGEFCTFPLVQAGHGPXFKWQXWKMXXLVSDVTLXKKLGKXNXXFIKNLKGPFXXNXLPGXXXXXFLGKXXXPX

SEQ ID NO: 795 - protein, 259 aa, human
TKVDKRVEPKSCDKTHTCPPCPAPELLGGPSVFLFPPKPKDTLMISRTPEVTCVVVDVSHEDPEVKFNWYVDGVEVHNAKTKPREEQYNSTYRVVSVLTVLHQDWLNGKEYKCKVSNKALPAPIEKTISKAKGQPREPQVYTLPPSREEMTKNQVSLTCLVKGFYPSDIAVEWESNGQPENNYKTTPPVLDSDGSFFLYSKLTVKQSRWQQGNVFSCSVMHEALHKHYTQKSLSLSPGNECHGGKPRSRALPSHKMLAS

SEQ ID NO: 796 - protein, 340 aa, human
  misc_feature (340)..(340): Xaa can be any naturally occurring amino acid
RTRGLAQPGRSLRLSCTTSGFIFGDYDMSWVRQAPGKGLEFIAFIRSKTYGATTQYAASVEGRFTISRDDSRSIVYLQMNSLKTEDAAIYFCTRGRAILDYWGHGSLVTVSSASTKGPSVFPLAPSSKSTSGGTAALGCLVKDYFPEPVTVSWNSGALTSGVHTFPAVLQSSGLYSLSSVVTVPSSSLGTQTYICNVNHKPSNTKVDKRVEPQSCEKTPTCPPWPAPELLGGTVSLPLPPKTQGTLMISRDPGPMPWGGTTPKKPGQVQLVTGTGGKGHNAKKSPREEQKNHPYRGGQRLTVLPTKWGEGKEKKAKGSQKGLPPPHPKKISQTNREPLKX

SEQ ID NO: 797 - protein, 602 aa, human
MKVAGGLELGAAALLSASPRALVTLSTGPTCSILPKNPLFPQNLSSQPCIKMEGDKSLTFSSYGLQWCLYELDKEEFQTFKELLKKKSSESTTCSIPQFEIENANVECLALLLHEYYGASLAWATSISIFENMNLRTLSEKARDDMKRHSPEDPEATMTDQGPSKEKVPGISQAVQQDSATAAETKEQEISQAMEQEGATAAETEEQEISQAMEQEGATAAETEEQGHGGDTWDYKSHVMTKFAEEEDVRRSFENTAADWPEMQTLAGAFDSDRWGFRPRTVVLHGKSGIGKSALARRIVLCWAQGGLYQGMFSYVFFLPVREMQRKKESSVTEFISREWPDSQAPVTEIMSRPERLLFIIDGFDDLGSVLNNDTKLCKDWAEKQPPFTLIRSLLRKVLLPESFLIVTVRDVGTEKLKSEVVSPRYLLVRGISGEQRIHLLLERGIGEHQKTQGLRAIMNNRELLDQCQVPAVGSLICVALQLQDVVGESVAPFNQTLTGLHAAFVFHQLTPRGVVRRCLNLEERVVLKRFCRMAVEGVWNRKSVFDGDDLMVQGLGESELRALFHMNILLPDSHCEEYYTFFHLSLQDFCAALYYVLEGRS

SEQ ID NO: 798 - protein, 436 aa, human
KMAEVGEIIEGCRLPVLRRNQDNEDEWPLAEILSVKDISGRKLFYVHYIDFNKRLDEWVTHERLDLKKIQFPKKEAKTPTKNGLPGSRPGSPEREVKRKVEVVSPATPVPSETAPASVFPQNGAARRAVAAQPGRKRKSNCLGTDEDSQDSSDGIPSAPRMTGSLVSDRSHDDIVTRMKNIECIELGRHRLKPWYFSPYPQELTTLPVLYLCEFCLKYGRSLKCLQRHLTKCDLRHPPGNEIYRKGTISFFEIDGRKNKSYSQNLCLLAKWFLDHKTLYYDTDPFLFYVMTEYDCKGFTSWATSQGERSTGDYNVACILTWLPTAPGLRKLLIKSAMTLQVEGKQGPLKPLSTWPPSIELCPNILKPGLNRKPGSPNPSWDREPRLQGVVLPRKPISNIRAESSRKPGGLRLLRPGTHRASPGRERGWPHPLVKAG

SEQ ID NO: 799 - protein, 348 aa, human
  misc_feature (249)..(249): Xaa can be any naturally occurring amino acid
  misc_feature (257)..(257): Xaa can be any naturally occurring amino acid
  misc_feature (271)..(271): Xaa can be any naturally occurring amino acid
  misc_feature (273)..(273): Xaa can be any naturally occurring amino acid
  misc_feature (278)..(278): Xaa can be any naturally occurring amino acid
  misc_feature (291)..(292): Xaa can be any naturally occurring amino acid
  misc_feature (297)..(298): Xaa can be any naturally occurring amino acid
  misc_feature (308)..(308): Xaa can be any naturally occurring amino acid
  misc_feature (311)..(313): Xaa can be any naturally occurring amino acid
  misc_feature (318)..(319): Xaa can be any naturally occurring amino acid
  misc_feature (321)..(321): Xaa can be any naturally occurring amino acid
  misc_feature (323)..(323): Xaa can be any naturally occurring amino acid
  misc_feature (328)..(328): Xaa can be any naturally occurring amino acid
  misc_feature (330)..(333): Xaa can be any naturally occurring amino acid
  misc_feature (335)..(335): Xaa can be any naturally occurring amino acid
  misc_feature (340)..(340): Xaa can be any naturally occurring amino acid
  misc_feature (342)..(343): Xaa can be any naturally occurring amino acid
  misc_feature (346)..(347): Xaa can be any naturally occurring amino acid
GLGSRLGLRGCFGAARLLYPRFQSRGPQGVEDGDRPQPSSKTPRIPKIYTKTGDKGFSSTFTGERRPKDDQVFEAVGTTDELSSAIGFALELVTEKGHTFAEELQKIQCTLQDVGSALATPCSSAREAHLKYTTFKAGPILELEQWIDKYTSQLPPLTAFILPSGGKISSALHFCRAVCRRAERRVVPLVQMGETDANVAKFLNRLSDYLFTLARYAAMKEGNQEKIYKKNDPSAESEGLNHRKWELGXSLHGDGRXKRNLPFWGPGSRAXPXRLKAXFLSQPQLLIYPSXXLPQGXXEPFGDFCPTXFPXXXGFWKXXEXIXLCRKXGXXXXPXKRTWXKXXNLXXW

SEQ ID NO: 800 - protein, 408 aa, human
  misc_feature (379)..(379): Xaa can be any naturally occurring amino acid
  misc_feature (392)..(392): Xaa can be any naturally occurring amino acid
  misc_feature (395)..(395): Xaa can be any naturally occurring amino acid
  misc_feature (402)..(406): Xaa can be any naturally occurring amino acid
  misc_feature (408)..(408): Xaa can be any naturally occurring amino acid
AISSTVTSSQGTAPTGFVFGPSTTSVAPATTSGGFSFTGGSTAQPSGFNIGSAGNSAQPTAPATLPFTPATPAATTAGATQPAAPTPTATITSTGPSLFASIATAPTSSATTGLSLCTPVTTAGAPTAGTQGFSLKAPGAASGTSTTTSTAATATATTTSSSSTTGFALNLKPLAPAGIPSNTAAAVTAPPGPGAAAGAAASSAMTYAQLESLINKWSLELEDQERHFLQQATQVNAWDRTLIENGEKITSLHPRGGEGEAGPKEAGPGARLHPVPAKRAGRTAEPLEGLVRNQSGTFTCSTRMRNVKNLQAGNIDAHSTQGPVLKKHQQLKRSGPPPNRDPWKKLKNLMGHGPLQGTTKSPSKKGRSTRGGRPPRKKXNSYTFLEKKPGPXFYXFIENPPXXXXXKX

SEQ ID NO: 801 - protein, 378 aa, human
  misc_feature (248)..(248): Xaa can be any naturally occurring amino acid
GEPAGTDPGLDDLDVALSNLEVKLEGSAPTDVLDSLTTIPELKDHLRIFRPRKLTLKGYRQHWVVFKETTLSYYKSQDEAPGDPIQQLNLKGCEVVPDVNVSGQKFCIKLLVPSPEGMSEIYLRCQDEQQYARWMAGCRLASKGRTMADSSYTSEVQAILAFLSLQRTGSGGPGNHPHGPDASAEGLNPYGLVAPRFQRKFKAKQLTPRILEAHQNVAQLSLAEAQLRFIQAWQSLPDFGISYVMVRXKGSRKDEILGIANNRLIRIDLAAGDVVKTWRFSKMGQWNVNWEIPQVDIQIKLPCVLPHHRPLAQCNTTISRAKYLLPLPPHTPRLAQQTNSSKDNQSPPHTPTSFIYNLHLTSLLHLTPYNILQTSLPL

SEQ ID NO: 802 - protein, 286 aa, human
GGPGARRGWPPRPLGLRGEGASAPVVIAPAAFSLGLRDTAPRPGARCVPGRVLGTVPRVPYKDCQAIMKVLLLKDAKEDDCGQDPYIRELGLYGLEATLIPVLSFEFLSLPSFSEKLSHPEDYGGLIFTSPRAVEAAELCLEQNNKTEVWERSLKEKWNAKSVYVVGNATASLVSKIGLDTEGETCGNAEKLAEYICSRESSALPLLFPCGNLKREILPKALKDKGIAMESITVYQTVAHPGIQGNLNSYYSQQGVPASITFFSPSGLTYSLKHIQELSGDNIDQI

SEQ ID NO: 803 - protein, 304 aa, human
  misc_feature (304)..(304): Xaa can be any naturally occurring amino acid
EKLKDDSKFSEAITVLLSWIERGEVNRRSANQFYSMVQSANSHVRRLMNEKATHEQEMEEAKENFKNALTGILTQFEQIVAVFNASTRQKAWDHFSKAQRKNIDIWRKHSEELRNAQSEQLMGIRREEEMEMSDDENCDSPTKKMRVDESALAAQAYALKEENDSLRWQLDAYRNEVELLKQEKEQLFRTEENLTKDQQLQFLQQTMQGMQQQLLTIQEELNNKKSELEQAKEEQSHTQALLKVLQEQLKGTKELVETNGHSHEDSNEINVLTVALVNQDRENNIEKEAKANQRKKLCVSYQRX

SEQ ID NO: 804 - protein, 282 aa, human
GKAHSPFYQEGVSNALLKMAELGLTRAADVLLRHGANLNFEDPVTYYTALHIAVLRNQPDMVELLVHHGADVNRRDRIHESSPLDLASEEPERLPCLQRLLDLGADVNAADKHGKTALLHALASSDGVQIHNTENIRLLLEGGADVKATTKDGDTVFTCIIFLLGETVGGDKEEAQMINRFCFQVTRLLLAHGADPSECPAHESLTHICLKSFKLHFPLLRFLLESGAAYNCSLHGASCWSGFHIIFERLCSHPGCTEDESHADLLRKAETVLISWPTLRNS

SEQ ID NO: 805 - protein, 281 aa, human
AEKVKGEARPCRFSSGSPGGLMSRSGTDPQQRQQASEADAAAATFRANDHQHIRYNPLQDEWVLVSAHRMKRPWQGQVEPQLLKTVPRHDPLNPLCPGAIRANGEIFENKGAMMGCSNPHPHCQVWASSFLPDIAQREERSQQAYKSQHGEPLLMEYSRQELLRKERLVLTSEHWLVLVPFWATWPYQTLLLPRRHVRRLPELTPAERDDLASIMKKLLTKYDNLFETSFPYSMGWHGAPTGSEAGANWKPLAAARSLLPSAPALCHCPEIHGWLRNACSG

SEQ ID NO: 806 - protein, 288 aa, human [sequence omitted]

SEQ ID NO: 807 - protein, 440 aa, human
  misc_feature (297)..(297): Xaa can be any naturally occurring amino acid
  misc_feature (308)..(308): Xaa can be any naturally occurring amino acid
LHSVPRGSALCAMDGIVPDIAVGTKRGSDELFSTCVTNGPFIMSSNSASAANGNDSKKFKGDSRSAGVPSRVIHIRKLPIDVTEGEVISLGLPFGKVTNLLMLKGKNQAFIEMNTEEAANTMVNYYTSVTPVLRGQPIYIQFSNHKELKTDSSPNQARAQAALQAVNSVQSGNLALAASAAAVDAGMAMAGQSPVLRIIVENLFYPVTLDVLHQIFSKFGTVLKIITFTKNNQFQALLQYADPVSAQHAKLSLDGQNIYNACCTLRIDFSKLTSLNVKYNNDKSRDYTRPDLAFRDXQPSLDQTWPRXSVHLGNPSLPAGAVSPPTLHSQLQPFPSNVTGPGPLHPPGGGNSAKVQSHPAWGGRNRILAHPPQESPNLLFPPMTAPKNPFKNLITRPTTLHDLRPFPRPSPHTKSSDQSRRPSSLFTQQHPLQQTPQYST

SEQ ID NO: 808 - protein, 282 aa, human
  misc_feature (282)..(282): Xaa can be any naturally occurring amino acid
GECGARGDSAGLAAWDPGGDRGSSSPRPEERGPAAAAMLETLRERLLSVQQDFTSGLKTLSDKSREAKVKSKPRTVPFLPKYSAGLELLSRYEDTWAALHRRAKDCASAGELVDSEVVMLSAHWEKKKTSLVELQEQLQQLPALIADLESMTANLTHLEASFEEVENNLLHLEDLCGQCELERCKHMQSQQLENYKKNKRKELETFKAELDAEHAQKVLEMEHTQQMKLKERQKFFEEAFQQDMEQYLSTGYLQIAERREPIGSMSSMEVNVDMLEQMDLMX

SEQ ID NO: 809 - protein, 264 aa, human
AHASAHASAHASGCSSGLRPDPAPMASEELQKDLEEVKVLLEKATRKRVRDALTAEKSKIETEIKNKMQQKSQKKAELLDNEKPAAVVAPITTGYTVKISNYGWDQSDKFVKIYITLTGVHQVPTENVQVHFTERSFDLLVKNLNGKSYSMIVNNLLKPISVEGSSKKVKTDTVLILCRKKVENTRWDYLTQVEKECKEKEKPSYDTETDPSEGLMNVLKKIYEDGDDDMKRTINKAWVESREKQAKGDTEFDFKVVLGTVMCG

SEQ ID NO: 810 - protein, 304 aa, human
VYTEVRELVSLKQEQQAFKEAADTERLALQALTEKLLRSEESVSRLPEEIRRLEEELRQLKSDSHGPKEDGGFRHSEAFEALQQKSQGLDSRLQHVEDGVLSMQVASARQTESLESLLSKSQEHEQRLAALQGRLEGLGSSEADQDGLASTVRSLGETQLVLYGDVEELKRSVGELPSTVESLQKVQEQVHTLLSQDQAQAARLPPQDFLDRLSSLDNLKASVSQVEADLKMLRTAVDSLVAYSVKIETNENNLESAKGLLDDLRNDLDRLFVKVEKIHEKVMNCVCRARISPISHDQKCVVFP

SEQ ID NO: 811 - protein, 107 aa, human
ASLKCSTVVCVICLEKPKYRCPACRVPYCSVVCFRKHKEQCNPETRPVEKKIRSALPTKTVKPVENKDDDDSIADFLNSDEEEDRVSLQNLKNLGESASLRSLLLNP

SEQ ID NO: 812 - protein, 339 aa, human
  misc_feature (261)..(261): Xaa can be any naturally occurring amino acid
  misc_feature (264)..(264): Xaa can be any naturally occurring amino acid
  misc_feature (266)..(266): Xaa can be any naturally occurring amino acid
  misc_feature (270)..(270): Xaa can be any naturally occurring amino acid
  misc_feature (278)..(278): Xaa can be any naturally occurring amino acid
  misc_feature (293)..(293): Xaa can be any naturally occurring amino acid
  misc_feature (303)..(303): Xaa can be any naturally occurring amino acid
  misc_feature (306)..(306): Xaa can be any naturally occurring amino acid
  misc_feature (309)..(309): Xaa can be any naturally occurring amino acid
  misc_feature (312)..(315): Xaa can be any naturally occurring amino acid
  misc_feature (326)..(327): Xaa can be any naturally occurring amino acid
  misc_feature (329)..(329): Xaa can be any naturally occurring amino acid
  misc_feature (331)..(331): Xaa can be any naturally occurring amino acid
  misc_feature (333)..(333): Xaa can be any naturally occurring amino acid
  misc_feature (335)..(335): Xaa can be any naturally occurring amino acid
  misc_feature (339)..(339): Xaa can be any naturally occurring amino acid
AHASALADSEKLPIQKHRNTETSKSPEKDVPMVEKKSKKPKKKEKKHKEKERDKEKKKEKEKKAEDLDFWLSTTPPPAPAPAPAPVPSTDECEDAKTEAQGEEDDAEGQDQDKKSPKPKKKKHRKEKEERTKGKKKSKKQPPGSEEAAGEPVQNGAPEEEQLPPESSYSLLAENSYVKMTCDIRGSLQEDSQVTVAIVLENRSSSILKGMELSVLDSLNARMARPQGSSVHDGVPVPFQLPPGVSNEAQYVFTIQSIVMAXKLXGXLSFXAKNDEGAXHEKLDFRLHFQLQLXTSPLPATVTXLLXCWXLGXXXXSFKSMAFGCSXXFXWXKXVXPPFX

SEQ ID NO: 813 - protein, 256 aa, human
  misc_feature (203)..(203): Xaa can be any naturally occurring amino acid
  misc_feature (213)..(213): Xaa can be any naturally occurring amino acid
  misc_feature (248)..(248): Xaa can be any naturally occurring amino acid
  misc_feature (251)..(251): Xaa can be any naturally occurring amino acid
  misc_feature (253)..(256): Xaa can be any naturally occurring amino acid
DRPAPEDLTVVLGQERRNHSCEPCQTLAVRSYRLHEAFSPVSYQHDLALLRLQEDADGSCALLSPYVQPVCLPSGAARPSETTLCQVAGWGHQFEGAEEYASFLQEAQVPFLSLERCSAPDVHGSSILPDMLCAGFLEGGTDACQGDSGGPLVCEDQAAERRLTLQGIISWGSGCGDRNKPGVYTDVAYYLAWIREHTVSLLXDSSFPPWFRXERVAGAWKARMCPIPQCRQLRARMAQDSLSALKCXKKXKXXXX

SEQ ID NO: 814 - protein, 360 aa, human
  misc_feature (248)..(249): Xaa can be any naturally occurring amino acid
  misc_feature (262)..(262): Xaa can be any naturally occurring amino acid
  misc_feature (264)..(264): Xaa can be any naturally occurring amino acid
  misc_feature (275)..(275): Xaa can be any naturally occurring amino acid
  misc_feature (278)..(278): Xaa can be any naturally occurring amino acid
  misc_feature (287)..(287): Xaa can be any naturally occurring amino acid
  misc_feature (297)..(297): Xaa can be any naturally occurring amino acid
  misc_feature (300)..(300): Xaa can be any naturally occurring amino acid
  misc_feature (307)..(308): Xaa can be any naturally occurring amino acid
  misc_feature (310)..(310): Xaa can be any naturally occurring amino acid
  misc_feature (316)..(316): Xaa can be any naturally occurring amino acid
  misc_feature (321)..(322): Xaa can be any naturally occurring amino acid
  misc_feature (326)..(326): Xaa can be any naturally occurring amino acid
  misc_feature (338)..(338): Xaa can be any naturally occurring amino acid
  misc_feature (344)..(344): Xaa can be any naturally occurring amino acid
  misc_feature (346)..(346): Xaa can be any naturally occurring amino acid
  misc_feature (348)..(351): Xaa can be any naturally occurring amino acid
  misc_feature (355)..(355): Xaa can be any naturally occurring amino acid
GKSLCCRNLAVEKAVSELPSECGFCLRQFPRSLLERHQKEECQDRVTQCKYKRIGCPWHGPFHELTVHEAACAHPTKTGSELMEILDGMDQSHRKEMQLYNSIFSLLSFEKIGYTGEAPRRLLHATQVWVGGLAARSLGAAGSGHWALTAPDSRALDKLPVDRWTPRSRRQAGDVEGGAEADPRCTPVWLSQQPRPPVLATLASPPLQGGISLWGSRASRQSGSNQKSGQVSGGLGARGLPLGPWGKXXTLPSEVLPAGSHXPXPWASQAGTKPXQGXGSTTSRCPXQTVKPGVKPXKPXGWMLAQXXWXSWLSGXLPPPXXVSGXRTRPKPGPKRKXKTLFNXGXLXXXXSFIXNQKRG

SEQ ID NO: 815 - protein, 375 aa, human
  misc_feature (240)..(240): Xaa can be any naturally occurring amino acid
  misc_feature (253)..(254): Xaa can be any naturally occurring amino acid
  misc_feature (274)..(274): Xaa can be any naturally occurring amino acid
  misc_feature (278)..(278): Xaa can be any naturally occurring amino acid
  misc_feature (283)..(283): Xaa can be any naturally occurring amino acid
  misc_feature (292)..(292): Xaa can be any naturally occurring amino acid
  misc_feature (298)..(298): Xaa can be any naturally occurring amino acid
  misc_feature (301)..(303): Xaa can be any naturally occurring amino acid
  misc_feature (306)..(306): Xaa can be any naturally occurring amino acid
  misc_feature (308)..(310): Xaa can be any naturally occurring amino acid
  misc_feature (312)..(312): Xaa can be any naturally occurring amino acid
  misc_feature (314)..(315): Xaa can be any naturally occurring amino acid
  misc_feature (320)..(320): Xaa can be any naturally occurring amino acid
  misc_feature (322)..(323): Xaa can be any naturally occurring amino acid
  misc_feature (328)..(329): Xaa can be any naturally occurring amino acid
  misc_feature (338)..(338): Xaa can be any naturally occurring amino acid
  misc_feature (343)..(343): Xaa can be any naturally occurring amino acid
  misc_feature (346)..(346): Xaa can be any naturally occurring amino acid
  misc_feature (348)..(348): Xaa can be any naturally occurring amino acid
  misc_feature (352)..(352): Xaa can be any naturally occurring amino acid
  misc_feature (356)..(356): Xaa can be any naturally occurring amino acid
  misc_feature (358)..(358): Xaa can be any naturally occurring amino acid
  misc_feature (365)..(365): Xaa can be any naturally occurring amino acid
  misc_feature (367)..(367): Xaa can be any naturally occurring amino acid
  misc_feature (373)..(373): Xaa can be any naturally occurring amino acid
  misc_feature (375)..(375): Xaa can be any naturally occurring amino acid
AMSLKLQASNVTNKNDPKSINSRVFIGNLNTALVKKSDVETIFSKYGRVAGCSVHKGYAFVQYSNERHARAAVLGENGRVLAGQTLDINMAGEPKPDRPKGLKRAASAIYSGYIFDYDYYRDDFYDRLFDYRGRLSPVPVPRAVPVKRPRVTVPLVRRVKTNVPVKLFARSTAVTTSSAKIKLKSSELQAIKTELTQIKSNIDALLSRLEQIAAEQKANPDGKKKGDGGGAGGGGGGGGXGGGGSGGGGGGGXXRPPAPQENTTSEAGLPQGEXRTRXDGDEXRLLTHSEEXLEHSQXTNXXXGAXAXXXLXGXXATTRXAXXAPGLXXGTNPGCPPXRVPKXTGXRXLLPXESNXGXVLCRGIXGXFFPRTXLX

SEQ ID NO: 816 - protein, 320 aa, human
  misc_feature (34)..(34): Xaa can be any naturally occurring amino acid
  misc_feature (143)..(143): Xaa can be any naturally occurring amino acid
  misc_feature (146)..(146): Xaa can be any naturally occurring amino acid
  misc_feature (216)..(216): Xaa can be any naturally occurring amino acid
  misc_feature (241)..(241): Xaa can be any naturally occurring amino acid
  misc_feature (245)..(245): Xaa can be any naturally occurring amino acid
  misc_feature (249)..(249): Xaa can be any naturally occurring amino acid
  misc_feature (251)..(251): Xaa can be any naturally occurring amino acid
  misc_feature (259)..(259): Xaa can be any naturally occurring amino acid
  misc_feature (262)..(262): Xaa can be any naturally occurring amino acid
  misc_feature (271)..(271): Xaa can be any naturally occurring amino acid
  misc_feature (273)..(273): Xaa can be any naturally occurring amino acid
  misc_feature (283)..(283): Xaa can be any naturally occurring amino acid
  misc_feature (288)..(288): Xaa can be any naturally occurring amino acid
  misc_feature (290)..(290): Xaa can be any naturally occurring amino acid
  misc_feature (292)..(293): Xaa can be any naturally occurring amino acid
  misc_feature (296)..(296): Xaa can be any naturally occurring amino acid
  misc_feature (309)..(310): Xaa can be any naturally occurring amino acid
  misc_feature (313)..(314): Xaa can be any naturally occurring amino acid
  misc_feature (316)..(320): Xaa can be any naturally occurring amino acid
AHASGGSEERGEEKGTSSPDYRHYLRMWAKEKEXQKETIKDLPKMNQKQFIELCKTLYNMFSEDPMEQDLYHAIATVASLLLRIGEVGKKFSARTGRKPRDCATEEDEPPAPELHQDAARELQPPAAGDPQAKAGGDTHLGKXPQXSQVVVEGGSGEGQGSPSQLLSDDETKDDMSMSSYSVVSTGSLQCEDLADDTVLVGGEACSPTARIGGTVXTDWCISFEQILASILTESVLVNFFXKRVXIGLXIXGPKRKGRXSSXPPGEPSSLXFXGCLQAVRPWXKVSSXGXGXXIFXLPFPSFIGFSLKXXPFXXSXXXXX

SEQ ID NO: 817 - protein, 244 aa, human
  misc_feature (197)..(197): Xaa can be any naturally occurring amino acid
  misc_feature (239)..(239): Xaa can be any naturally occurring amino acid
  misc_feature (244)..(244): Xaa can be any naturally occurring amino acid
KPSVPSADSETPLTQDRPGSPSGSEDKGNPAPELRASFLPRTLSLRNSISRIMSEADSGTLEDEWQAISEIASTCNTILESLSREGQPIPESGDPKGTPKSDAEPEPGNLSEKVSHLESMLRKLQEDLQKEKADRAALEEEVRSLRHNNRRLQAESESAATRLLLASKQLGSPTADLAAVWNHLGPGHCGHTGPSSXTLPAQRRVLALPPSLAPLLVGEVASTPFLFVNILWRKRDFRXKSTDX

SEQ ID NO: 818 - protein, 360 aa, human
  misc_feature (65)..(65): Xaa can be any naturally occurring amino acid
  misc_feature (229)..(229): Xaa can be any naturally occurring amino acid
  misc_feature (264)..(264): Xaa can be any naturally occurring amino acid
  misc_feature (272)..(273): Xaa can be any naturally occurring amino acid
  misc_feature (282)..(282): Xaa can be any naturally occurring amino acid
  misc_feature (284)..(286): Xaa can be any naturally occurring amino acid
  misc_feature (294)..(294): Xaa can be any naturally occurring amino acid
  misc_feature (299)..(299): Xaa can be any naturally occurring amino acid
  misc_feature (305)..(306): Xaa can be any naturally occurring amino acid
  misc_feature (309)..(309): Xaa can be any naturally occurring amino acid
  misc_feature (318)..(318): Xaa can be any naturally occurring amino acid
  misc_feature (321)..(321): Xaa can be any naturally occurring amino acid
  misc_feature (325)..(325): Xaa can be any naturally occurring amino acid
  misc_feature (327)..(328): Xaa can be any naturally occurring amino acid
  misc_feature (331)..(331): Xaa can be any naturally occurring amino acid
  misc_feature (334)..(334): Xaa can be any naturally occurring amino acid
  misc_feature (337)..(338): Xaa can be any naturally occurring amino acid
  misc_feature (342)..(343): Xaa can be any naturally occurring amino acid
  misc_feature (347)..(347): Xaa can be any naturally occurring amino acid
  misc_feature (349)..(349): Xaa can be any naturally occurring amino acid
  misc_feature (351)..(351): Xaa can be any naturally occurring amino acid
  misc_feature (356)..(360): Xaa can be any naturally occurring amino acid
AHASGSTEHALCGKPDQIEGSLAAFLPDLSLAKRKTWRNPWRRSYHKRKKAEWEVDPDYCEEVKXTPPYDSSHRILDVMDMTIFDFLMGNMDRHHYETFEKFGNETFIIHLDNGRGFGKYSHDELSILVPLQQCCRIRKSTYLRLQLLAKEEYKLSLLMAESLRGDQVAPVLYQPHLEALDRRLRVVLKAVRDCVERDGLHSVVDDDLDTEHRAASARCPPAAALPGTXTEGPDLPASACARREFSEFRGRTGSSGVGSCCHRXRGSPGLIXXILSVFDQKXLXXXRCLCSRKXRPAPXAFHSFXXGKXPLFTIWIFXEKXYKPXTXXKCXSLXTNXXTPSXXGGPXGXLXPRFPXXXXX

SEQ ID NO: 819 - protein, 289 aa, human
  misc_feature (289)..(289): Xaa can be any naturally occurring amino acid
RLYASASVPAGERPFMCTWSYCGKRFTRSDELQRHKRTHTGEKKFACPECPKRFMRSDHLSKHIKTHQNKKGGPGVALSVGTLPLDSGAGSEGSGTATPSALITTNMVAMEAICPEGIARLANSGINVMQVADLQSINISGNGFDQAPGARDIWAIPLNPGMQGSMGPRDMEERAMKHNAWCEESGEGYKRGDGVPAPICIISASLKVGNISENSVGATLAFVPQFLLTLLTPTGRDPHASSISAWTPVDRSSNDLRTPSGFVQNARLPPGVFYWESKLAWRDFQSRSX

SEQ ID NO: 820 - protein, 307 aa, human; identical to SEQ ID NO: 786
  misc_feature (247)..(249): Xaa can be any naturally occurring amino acid
  misc_feature (256)..(256): Xaa can be any naturally occurring amino acid
  misc_feature (258)..(261): Xaa can be any naturally occurring amino acid
  misc_feature (276)..(276): Xaa can be any naturally occurring amino acid
  misc_feature (281)..(281): Xaa can be any naturally occurring amino acid
  misc_feature (288)..(288): Xaa can be any naturally occurring amino acid
  misc_feature (291)..(293): Xaa can be any naturally occurring amino acid
  misc_feature (299)..(300): Xaa can be any naturally occurring amino acid
  misc_feature (302)..(302): Xaa can be any naturally occurring amino acid
  misc_feature (304)..(307): Xaa can be any naturally occurring amino acid

SEQ ID NO: 821 - protein, 386 aa, human
  misc_feature (264)..(264): Xaa can be any naturally occurring amino acid
  misc_feature (274)..(274): Xaa can be any naturally occurring amino acid
  misc_feature (279)..(282): Xaa can be any naturally occurring amino acid
  misc_feature (289)..(291): Xaa can be any naturally occurring amino acid
  misc_feature (311)..(311): Xaa can be any naturally occurring amino acid
  misc_feature (314)..(315): Xaa can be any naturally occurring amino acid
  misc_feature (320)..(320): Xaa can be any naturally occurring amino acid
  misc_feature (323)..(323): Xaa can be any naturally occurring amino acid
  misc_feature (325)..(325): Xaa can be any naturally occurring amino acid
  misc_feature (331)..(331): Xaa can be any naturally occurring amino acid
  misc_feature (334)..(334): Xaa can be any naturally occurring amino acid
  misc_feature (337)..(337): Xaa can be any naturally occurring amino acid
  misc_feature (339)..(339): Xaa can be any naturally occurring amino acid
  misc_feature (343)..(344): Xaa can be any naturally occurring amino acid
  misc_feature (350)..(351): Xaa can be any naturally occurring amino acid
  misc_feature (354)..(355): Xaa can be any naturally occurring amino acid
  misc_feature (359)..(359): Xaa can be any naturally occurring amino acid
  misc_feature (366)..(367): Xaa can be any naturally occurring amino acid
  misc_feature (376)..(377): Xaa can be any naturally occurring amino acid
  misc_feature (380)..(381): Xaa can be any naturally occurring amino acid
  misc_feature (386)..(386): Xaa can be any naturally occurring amino acid
AGSPVGEGTGSPPKWQIGEQEFEALMRMLDNLGYRTGYPYRYPALREKSKKYSDVEVPASVTGYSFASDGDSGTCSPLRHSFQKQQREKTRWLNSGRGDEASEEGQNGSSPKSKTKWTKEDGHRTSTSAVPNLFVPLNTNPKEVQEMRNKIREQNLQDIKTAGPQSQVLCGVVMDRSLVQDAPLSDCTETIEGLELTEQTFSPAKSLSFRKGELVTASKAIIEKEYQPHVIVSTTGPNPFTTLTDRELEEYRREVERKQKGSEXNLDEAREPKXKESSXXXXGSPTRLXXXPSSWKNQETDALKKYLLPPXAGXXYWKRXCCXLXNSPRIXPLXKPXKXPASXXKKGEKXXNPXXPWRXLMGAAPXXPQTHPGGEXXPPXXKRGPX

SEQ ID NO: 822 - protein, 253 aa, human
  misc_feature (161)..(161): Xaa can be any naturally occurring amino acid
NGGFKRPLAPSGRSPVEGLGRAHRSPASPRVPPVPDYVAHPERWTKYSLEDVTEVSEQSNQATALAFLGSQSLAAPTDCVSSFNQDPSSCGEGRVIFTKPVRGVEARHERKRVLGKVGEPGRGGLGNPATDRGEGPVELAHLAGPGSPEAEEWGSPHGGLXEVEALSGSVHSGSVPGLPPVETVGFHGSRKRSRDHFRKQSSSPEDPGAEVKGDGPPPPGHCHPAAFQWGWQGAPWHCLAGREEPAGAPVPRL

SEQ ID NO: 823 - protein, 463 aa, human
  misc_feature (269)..(269): Xaa can be any naturally occurring amino acid
  misc_feature (278)..(278): Xaa can be any naturally occurring amino acid
  misc_feature (296)..(296): Xaa can be any naturally occurring amino acid
  misc_feature (321)..(321): Xaa can be any naturally occurring amino acid
PTRPMESIFHEKQEGSLCAQHCLNNLLQGEYFSPVELSSIAHQLDEEERMRMAEGGVTSEDYRTFLQQPSGNMDDSGFFSIQVISNALKVWGLELILFNSPEYQRLRIDPINERSFICNYKEHWFTVRKLGKQWFNLNSLLTGPELISDTYLALFLAQLQQEGYSIFVVKGDLPDCEADQLLQMIRVQQMHRPKLIGEELAQLKEQRVHKTDLERVLEANDGSGMLDEDEEDLQRALALSRQEIDMEDEEADLRRAIQLSMQRFQKHIXRYDTDIRYXSYFRRASEETRSLLKTAXKAATAAAAAAAAAAAAAAAAGGTIXDRVTPMRATNQSETLWKNLGEAREKNCFGNGTMSLKLPKRLKTKKKKTLKKIKNLPSTYPGITKRPPWKGQKREKTLWVQKKRKGKAPEQKFSNSQGPQKTIFKKKKRAAPTIQLPAPINKAHTHDTHRGFEPTVILNEENT

SEQ ID NO: 824 - protein, 359 aa, human
  misc_feature (276)..(276): Xaa can be any naturally occurring amino acid
  misc_feature (282)..(282): Xaa can be any naturally occurring amino acid
  misc_feature (306)..(306): Xaa can be any naturally occurring amino acid
  misc_feature (330)..(330): Xaa can be any naturally occurring amino acid
  misc_feature (332)..(332): Xaa can be any naturally occurring amino acid
  misc_feature (334)..(337): Xaa can be any naturally occurring amino acid
  misc_feature (343)..(343): Xaa can be any naturally occurring amino acid
  misc_feature (345)..(345): Xaa can be any naturally occurring amino acid
  misc_feature (347)..(347): Xaa can be any naturally occurring amino acid
  misc_feature (350)..(350): Xaa can be any naturally occurring amino acid
  misc_feature (353)..(353): Xaa can be any naturally occurring amino acid
  misc_feature (357)..(359): Xaa can be any naturally occurring amino acid
GVRGLRCSGRRRSLEVATSLPHPSPGPRPAADVKMSSSEEVSWISWFCGLRGNEFFCEVDEDYIQDKFNLTGLNEQVPHYRQALDMILDLEPDEELEDNPNQSDLIEQAAEMLYGLIHARYILTNRGIAQMLEKYQQGDFGYCPRVYCENQPMLPIGLSDIPGEAMVKLYCPKCMDVYTPKSSRHHHTDGAYFGTGFPHMLFMVHPEYRPKRPANQFVPRLYGFKIHPMAYQLQLQAASNFKSPVKTIRFPPPPVLQSLTFPFFFATLSGTLYGFXFKLKEXVIVVGNMKIKKKRPTNLLVLAVGXKERMVCWTPGAPHGPTPPPQNENXKXLXXXXWGGFLXGXKXNSXRGXNAGXXX

SEQ ID NO: 825 - protein, 355 aa, human
  misc_feature (270)..(270): Xaa can be any naturally occurring amino acid
  misc_feature (294)..(295): Xaa can be any naturally occurring amino acid
  misc_feature (305)..(305): Xaa can be any naturally occurring amino acid
  misc_feature (313)..(313): Xaa can be any naturally occurring amino acid
  misc_feature (317)..(318): Xaa can be any naturally occurring amino acid
  misc_feature (325)..(326): Xaa can be any naturally occurring amino acid
  misc_feature (330)..(331): Xaa can be any naturally occurring amino acid
  misc_feature (333)..(336): Xaa can be any naturally occurring amino acid
  misc_feature (338)..(339): Xaa can be any naturally occurring amino acid
  misc_feature (347)..(347): Xaa can be any naturally occurring amino acid
  misc_feature (350)..(350): Xaa can be any naturally occurring amino acid
  misc_feature (353)..(353): Xaa can be any naturally occurring amino acid
  misc_feature (355)..(355): Xaa can be any naturally occurring amino acid
GLDISSVNSLAEVHRLYVGGPPLEKEPRELFVKGTMKDIRENFQDLMQYCAQDVWATHEVFQQQLPLFLERCPHPVTLAGMLEMGVSYLPVNQNWERYLAEAQGTYEELQREMKKSLMDLANDACQLLSGERYKEDPWLWDLEWDLQEFKQKKAKKVKKEPATASKLPIEGAGAPGDPMDQEDLGPCSEEEEFQQDVMARACLQKLKGTTELLPKRPQHLPGHPGWYRKLCPRLDDPAWTPGPSLLSLQMRVTPKLMALTWDGFPLHYSXRHGWGYLVPGRRDNLAKLPTGTTXXSAGGVCPYKXIESLYRNXVSKXXTTTCPRXXPGEXXLXXXXMXXANGKKLDXNGXAKXKX

SEQ ID NO: 826 - protein, 345 aa, human
  misc_feature (233)..(234): Xaa can be any naturally occurring amino acid
  misc_feature (245)..(245): Xaa can be any naturally occurring amino acid
  misc_feature (259)..(259): Xaa can be any naturally occurring amino acid
  misc_feature (267)..(267): Xaa can be any naturally occurring amino acid
  misc_feature (275)..(275): Xaa can be any naturally occurring amino acid
  misc_feature (278)..(279): Xaa can be any naturally occurring amino acid
  misc_feature (281)..(281): Xaa can be any naturally occurring amino acid
  misc_feature (283)..(283): Xaa can be any naturally occurring amino acid
  misc_feature (286)..(286): Xaa can be any naturally occurring amino acid
  misc_feature (288)..(288): Xaa can be any naturally occurring amino acid
  misc_feature (294)..(294): Xaa can be any naturally occurring amino acid
  misc_feature (299)..(299): Xaa can be any naturally occurring amino acid
  misc_feature (301)..(301): Xaa can be any naturally occurring amino acid
  misc_feature (303)..(304): Xaa can be any naturally occurring amino acid
  misc_feature (307)..(307): Xaa can be any naturally occurring amino acid
  misc_feature (309)..(309): Xaa can be any naturally occurring amino acid
  misc_feature (312)..(313): Xaa can be any naturally occurring amino acid
  misc_feature (316)..(316): Xaa can be any naturally occurring amino acid
  misc_feature (321)..(321): Xaa can be any naturally occurring amino acid
  misc_feature (325)..(330): Xaa can be any naturally occurring amino acid
  misc_feature (334)..(335): Xaa can be any naturally occurring amino acid
  misc_feature (338)..(339): Xaa can be any naturally occurring amino acid
  misc_feature (343)..(343): Xaa can be any naturally occurring amino acid
GTLRRARQAFPAAGRAQRLVGLRGGGGSWSLALAWQEPSSFRKKPSGRGPASASREGDSCGGDSAGRDEPRRLRQRRCRLRGPQDSLEAPAHRSGLCLEPSPAPASLPDPFVRPEAAAGTAMAANMYRVGDYVYFENSSSNPYLVRRIEELNKTANGNVEAKVVCLFRRRDISSSLNSLADSNAREFEEESKQPGVSEQQRHQLKHRELFLSRQFESLPATHIRGKCSVTLLXXTDILSQYLEKXDCFFLLTGVPRAKXTFSLIRAXLKLVANTXLKXXIXRXNLXFXTTKNEXKVLGXKXPXXKTXNXQFXXGAXTGETXQKPXXXXXXPNLXXNAXXPSQXLL

SEQ ID NO: 827 - protein, 370 aa, human
  misc_feature (257)..(257): Xaa can be any naturally occurring amino acid
  misc_feature (270)..(270): Xaa can be any naturally occurring amino acid
  misc_feature (275)..(275): Xaa can be any naturally occurring amino acid
  misc_feature (283)..(284): Xaa can be any naturally occurring amino acid
  misc_feature (303)..(303): Xaa can be any naturally occurring amino acid
  misc_feature (311)..(311): Xaa can be any naturally occurring amino acid
  misc_feature (317)..(317): Xaa can be any naturally occurring amino acid
  misc_feature (328)..(329): Xaa can be any naturally occurring amino acid
  misc_feature (335)..(336): Xaa can be any naturally occurring amino acid
  misc_feature (338)..(339): Xaa can be any naturally occurring amino acid
  misc_feature (343)..(345): Xaa can be any naturally occurring amino acid
  misc_feature (347)..(347): Xaa can be any naturally occurring amino acid
  misc_feature (349)..(349): Xaa can be any naturally occurring amino acid
  misc_feature (351)..(351): Xaa can be any naturally occurring amino acid
  misc_feature (357)..(357): Xaa can be any naturally occurring amino acid
  misc_feature (359)..(360): Xaa can be any naturally occurring amino acid
  misc_feature (364)..(364): Xaa can be any naturally occurring amino acid
  misc_feature (370)..(370): Xaa can be any naturally occurring amino acid
DNSKSDSCREVTVTPNAAWGGEGSLGCGIGYGYLHRIPTQPPSYHKKPPGTPPPSALPLGAPPPDALPPGPTPEDSPSLETGSRQSDYMEALLQAPGSSMEDPLPGPGSPSHSAPDPDGLPHFMETPLQPPPPVQRVMDPGFLDVSGISLLDNSNASVWPSLPSSTELTTTAVSTSGPEDICSSSSSHERGGEATWSGSEFEVSFLDSPGAQAQADHLPQLTLPDSLTSAASPKDGLSAELLEAQAEEEPASTEGLXTGTEAEGLDSQAXISTTXHPGAVTRXXDEISGPNVGRQPGLHYAVXILAALVGXKASWVXKRGPWALGGRXXLAGNPXXQXXGPAXXXGXSXKXNRVWSXSXXKKIXKKRVSX

SEQ ID NO: 828 - protein, 333 aa, human
  misc_feature (268)..(271): Xaa can be any naturally occurring amino acid
  misc_feature (283)..(283): Xaa can be any naturally occurring amino acid
  misc_feature (291)..(294): Xaa can be any naturally occurring amino acid
  misc_feature (300)..(300): Xaa can be any naturally occurring amino acid
  misc_feature (303)..(303): Xaa can be any naturally occurring amino acid
  misc_feature (305)..(306): Xaa can be any naturally occurring amino acid
  misc_feature (308)..(310): Xaa can be any naturally occurring amino acid
  misc_feature (313)..(313): Xaa can be any naturally occurring amino acid
  misc_feature (316)..(316): Xaa can be any naturally occurring amino acid
  misc_feature (326)..(327): Xaa can be any naturally occurring amino acid
  misc_feature (329)..(330): Xaa can be any naturally occurring amino acid
AHASGGKTFRLRQQLVRHQRIHTREKPYECMECWKTFSSYSQLISHQSIHIGERPYECEECGKAFRLLSQLTQHQSIHTGEKPYECKECRKPFRLLSQLTQHQSIHTGEKPYECKECGKAFRLYSFLTQHQRIHTGEKPYKCKECKKAFRQHSHLTQHQKIHNGIKKAFKCICYRTSENSFLRKCVSCSIPSIINFILEKEYVDLKAFQHHLNMVYLQQIPMRECNECRKIFSLICHYLPFSTLPVFIGQDTKLLCLILLTCKMVIIXXXXISYLLLRNKLPXTPKIPYNXXXXFGSGVXALXWXXCXXXPCXGYXFPPGAEGPLXXAXXGEG

SEQ ID NO: 829 - protein, 278 aa, human
  misc_feature (222)..(222): Xaa can be any naturally occurring amino acid
  misc_feature (227)..(227): Xaa can be any naturally occurring amino acid
  misc_feature (230)..(230): Xaa can be any naturally occurring amino acid
  misc_feature (234)..(234): Xaa can be any naturally occurring amino acid
  misc_feature (236)..(238): Xaa can be any naturally occurring amino acid
  misc_feature (246)..(246): Xaa can be any naturally occurring amino acid
  misc_feature (248)..(248): Xaa can be any naturally occurring amino acid
  misc_feature (251)..(252): Xaa can be any naturally occurring amino acid
  misc_feature (254)..(255): Xaa can be any naturally occurring amino acid
  misc_feature (257)..(257): Xaa can be any naturally occurring amino acid
  misc_feature (260)..(261): Xaa can be any naturally occurring amino acid
  misc_feature (267)..(267): Xaa can be any naturally occurring amino acid
  misc_feature (272)..(272): Xaa can be any naturally occurring amino acid
  misc_feature (274)..(275): Xaa can be any naturally occurring amino acid
  misc_feature (277)..(277): Xaa can be any naturally occurring amino acid
VLGVAGGQTLGATPGPVMNGPADGEVDYKKKYRNLKRKLKFLIYEHECFQEELRKAQRKLLKVSRDKSFLLDRLLQYENVDEDSSDSDATASSDNSETEGTPKLSDTPAPKRKRSPPLGGAPSPSSLSLPPSTGFPLQASGVPSPYLSSSARSGCRAEELDLGEAAGRESSEAGTAAQMAVGPPDCPVGGPLTFPGRGSGAGGRDNPDPPPTPKCPPPTILXTVPRXMFXDAGXGXXXLDGNNDLXIXIPXXTXXSXPCXXGPRPGXFPVAXKXXFXF

SEQ ID NO: 830 - protein, 359 aa, human
  misc_feature (272)..(272): Xaa can be any naturally occurring amino acid
  misc_feature (276)..(276): Xaa can be any naturally occurring amino acid
  misc_feature (287)..(287): Xaa can be any naturally occurring amino acid
  misc_feature (290)..(290): Xaa can be any naturally occurring amino acid
  misc_feature (295)..(295): Xaa can be any naturally occurring amino acid
  misc_feature (306)..(306): Xaa can be any naturally occurring amino acid
  misc_feature (311)..(311): Xaa can be any naturally occurring amino acid
  misc_feature (319)..(319): Xaa can be any naturally occurring amino acid
  misc_feature (326)..(326): Xaa can be any naturally occurring amino acid
  misc_feature (331)..(333): Xaa can be any naturally occurring amino acid
  misc_feature (337)..(337): Xaa can be any naturally occurring amino acid
  misc_feature (342)..(342): Xaa can be any naturally occurring amino acid
  misc_feature (345)..(345): Xaa can be any naturally occurring amino acid
  misc_feature (350)..(350): Xaa can be any naturally occurring amino acid
  misc_feature (353)..(354): Xaa can be any naturally occurring amino acid
  misc_feature (357)..(359): Xaa can be any naturally occurring amino acid
GGSGAGLSGGSRGSGAMGDAPSPEEKLHLITRNLQEVLGEEKLKEILKERELKIYWGTATTGKPHVAYFVPMSKIADFLKAGCEVTILFADLHAYLDNMKAPWELLELRVSYYENVIKAMLESIGVPLEKLKFIKGTDYQLSKEYTLDVYRLSSVVTQHDSKKAGAEVVKQVEHPLLSGLLYPGLQALDEEYLKVDAQFGGIDQRKIFTFAEKYLPALGYSKRVHLMNPMVPGLTGSKMSSSEEESKIDLLDRKEDVKKKLKKAFCEPGMWXTMGXLSFIKHVLFPXKSXFVILXNEKWGGNKTYXAYVEXGKGLCCGXTSWKTKXLLKSXXXCWIXPGKVXPCXEKLAXLPXXIPXXX

SEQ ID NO: 831 - protein, 120 aa, human
  misc_feature (70)..(70): Xaa can be any naturally occurring amino acid
  misc_feature (79)..(79): Xaa can be any naturally occurring amino acid
  misc_feature (81)..(81): Xaa can be any naturally occurring amino acid
  misc_feature (89)..(89): Xaa can be any naturally occurring amino acid
  misc_feature (95)..(95): Xaa can be any naturally occurring amino acid
  misc_feature (98)..(98): Xaa can be any naturally occurring amino acid
  misc_feature (100)..(102): Xaa can be any naturally occurring amino acid
  misc_feature (105)..(106): Xaa can be any naturally occurring amino acid
  misc_feature (110)..(111): Xaa can be any naturally occurring amino acid
  misc_feature (115)..(116): Xaa can be any naturally occurring amino acid
  misc_feature (119)..(120): Xaa can be any naturally occurring amino acid
DLDHGKAWGILTFKGKTESEAREIEHVMYHDWRLVPKHEEEAFTAFTPAPEDSLASVPYPPLLRAMIIAXRQKNGNPSXEXPMLNVQRXPWNPGXTLXKXXXKGXXRAPXXKCQXXGGXX

SEQ ID NO: 832 - protein, 340 aa, human
  misc_feature (263)..(263): Xaa can be any naturally occurring amino acid
  misc_feature (265)..(265): Xaa can be any naturally occurring amino acid
  misc_feature (269)..(269): Xaa can be any naturally occurring amino acid
  misc_feature (289)..(289): Xaa can be any naturally occurring amino acid
  misc_feature (291)..(291): Xaa can be any naturally occurring amino acid
  misc_feature (295)..(295): Xaa can be any naturally occurring amino acid
  misc_feature (300)..(300): Xaa can be any naturally occurring amino acid
  misc_feature (308)..(308): Xaa can be any naturally occurring amino acid
  misc_feature (318)..(319): Xaa can be any naturally occurring amino acid
  misc_feature (321)..(321): Xaa can be any naturally occurring amino acid
  misc_feature (324)..(324): Xaa can be any naturally occurring amino acid
  misc_feature (326)..(327): Xaa can be any naturally occurring amino acid
  misc_feature (331)..(331): Xaa can be any naturally occurring amino acid
  misc_feature (335)..(335): Xaa can be any naturally occurring amino acid
  misc_feature (339)..(339): Xaa can be any naturally occurring amino acid
AHASGERQESPRLGNPKVSATLHGRLPSSFMGKVWKQQMYPQYATYYYPQYLQAKQSLVPAHPMAPPSPSTTSSNNNSSSSSNSGWDQLSKTNLYIRGLPPHTTDQDLVKLCQPYGKIVSTKAILDKTTNKCKGYGFVDFDSPAAAQKAVSALKASGVQAQMAKQQEQDPTNLYISNLPLSMDEQELENMLKPFGQVISTRILRDSSGTSRGVGFARMESTEKMSCYWSFWKIYDTTRSFCPHRTFIVVLLMEDRKKRQNPNXYXPWEXPWAKKEKVRLAGNDTLLDPXYXLAIXKRNFXLSPIQVLXTNRMDPQTSXXPXIAXPXXCPTXGKVXRGCXL

SEQ ID NO: 833 - protein, 355 aa, human
  misc_feature (267)..(267): Xaa can be any naturally occurring amino acid
  misc_feature (281)..(282): Xaa can be any naturally occurring amino acid
  misc_feature (285)..(285): Xaa can be any naturally occurring amino acid
  misc_feature (294)..(297): Xaa can be any naturally occurring amino acid
  misc_feature (299)..(299): Xaa can be any naturally occurring amino acid
  misc_feature (302)..(302): Xaa can be any naturally occurring amino acid
  misc_feature (306)..(306): Xaa can be any naturally occurring amino acid
  misc_feature (308)..(309): Xaa can be any naturally occurring amino acid
  misc_feature (327)..(327): Xaa can be any naturally occurring amino acid
  misc_feature (329)..(330): Xaa can be any naturally occurring amino acid
  misc_feature (335)..(335): Xaa can be any naturally occurring amino acid
  misc_feature (338)..(340): Xaa can be any naturally occurring amino acid
  misc_feature (344)..(344): Xaa can be any naturally occurring amino acid
  misc_feature (346)..(347): Xaa can be any naturally occurring amino acid
  misc_feature (350)..(350): Xaa can be any naturally occurring amino acid
  misc_feature (354)..(354): Xaa can be any naturally occurring amino acid
ADAWAGSVADSDAVVKLDDGHLNNSLSSPVQADVYFPRLIVPFCGHIKGGMRPGKKVLVMGIVDLNPESFAISLTCGDSEDPPADVAIELKAVFTDRQLLRNSCISGERGEEQSAIPYFPFIPDQPFRVEILCEHPRFRVFVDGHQLFDFYHRIQTLSAIDTIKINGDLQITKLGFKPPLFQIGSRATTILLVWKKCPSKIWRLKKKTKTNGKFHLRVVCPEESCWDKDTEPLYPENNTFMLDFIQTKLKWICDDLFGSKLFIFSKXGNAKQKCRHLKANXXGTXNQCISALKXXXXHXQIXAGYXIXXGGSRLTFFGLGLVWVWLXTXXNSNVXFWXXXYPGXIXXNVXNPVXL

SEQ ID NO: 834 - protein, 278 aa, human
  misc_feature (223)..(223): Xaa can be any naturally occurring amino acid
  misc_feature (225)..(225): Xaa can be any naturally occurring amino acid
  misc_feature (237)..(237): Xaa can be any naturally occurring amino acid
  misc_feature (239)..(239): Xaa can be any naturally occurring amino acid
  misc_feature (247)..(247): Xaa can be any naturally occurring amino acid
  misc_feature (250)..(250): Xaa can be any naturally occurring amino acid
  misc_feature (257)..(257): Xaa can be any naturally occurring amino acid
  misc_feature (259)..(259): Xaa can be any naturally occurring amino acid
  misc_feature (261)..(262): Xaa can be any naturally occurring amino acid
  misc_feature (264)..(264): Xaa can be any naturally occurring amino acid
  misc_feature (266)..(268): Xaa can be any naturally occurring amino acid
  misc_feature (273)..(273): Xaa can be any naturally occurring amino acid
  misc_feature (275)..(275): Xaa can be any naturally occurring amino acid
EEEYADPFALAQHKCSRIVRVEYRCPECAKVFSCPANLASHRRWHKPRPAPAAARAPEPEAAARAEAREAPGGGSDRDTPSPGGVSESGSEDGLYECHHCAKKFRRQAYLRKHLLAHHQALQAKGAPLAPPAEDLLALYPGPDEKAPQEAAGDGEGAGVLGLSASAECHLCPVCGESFASKGAQERHLRLLHAAQVFPCKYCPATFYSSPGLTRHINKCHPSXNXQVILLQVPVRPXCXAPFHPGPXIVXSLENQKXSXPXXPXTXXXLGEPXPXPPP

SEQ ID NO: 835 - protein, 242 aa, human
  misc_feature (239)..(239): Xaa can be any naturally occurring amino acid
  misc_feature (241)..(242): Xaa can be any naturally occurring amino acid
AGVKPYKCKQCGKAFTRSTTLPVHERTHTGVNADECKECGNAFSFPSEIRRHKRSHTGEKPYECKQCGKVFISFSSIQYHKMTHTGEKPYECKQCGKAFRCGSHLQKHGRTHTGEKPYECRQCGKAFRCTSDLQRHEKTHTEDKPYGCKQCGKGFRCASQLQIHERTHSGEKPHECKECGKVFKYFSSLRIHERTHTGEKPHECKQCGKAFRYFSSLHIHEKDTHWRAIVGMWQSLPLXPXX

SEQ ID NO: 836 - protein, 238 aa, human
  misc_feature (226)..(226): Xaa can be any naturally occurring amino acid
  misc_feature (230)..(238): Xaa can be any naturally occurring amino acid
GGPLTSGPRWWRPELRSCCSPERGVSINQFCKEFNERTKDIKEGIPLPTKILVKPDRTFEIKIGQPTVSYFLKAAAGIEKGARQTGKEVAGLVTLKHVYEIARIKAQDEAFALQDVPLSSVVRSIIGSARSLGIRVVKDLSSEELAAFQKERAIFLAAQKEADLAAQEEAAKKPLPHQLPDFKGGSCKSCAQGGGKEVTPYDDGFHDFEYIFVHLAVSRHQANNIXSYKXXXXXXXXX

SEQ ID NO: 837 - protein, 265 aa, human
  misc_feature (237)..(237): Xaa can be any naturally occurring amino acid
  misc_feature (265)..(265): Xaa can be any naturally occurring amino acid
TKTYTCNVDHKPSNTKVDKRVAPEFLGGPSVFLFPPKPKDTLMISRTPEVTCVVVDVSQEDPEVQFNWYVDGVEVHNAKTKPREEQFNSTYRVVSVLTVLHQDWLNGKEYKCKVSNKGLPSSIEKTISKAKGQPREPQVYTLPPSQEEMTKNQVSLTCLVKGFYPSDIAVEWESNGQPENNYKTTPPVLDSDGSFFLYSRLTVDKSRWQEGNVFSCSVMHEALHNHYTQKSLSLSLXKMSAGRQSPAPGALGSRENAARTRLLLX

SEQ ID NO: 838 - protein, 246 aa, human
KKLMLERIQHAVQLATEPLEKAVQSRLTGEEVNSCVEVLLEEAKDLLSDWLDSTLGCDVTDNSIFSKLPKFWEGDFHRDMEALNVLPPDVLTRVSEYVPEIVNFVQKIVDNGYGYVSNGSVYFDTAKFASSEKHSYGKLVPEAVGDQKALQEGEGDLSISADRLSEKRSPNDFALWKASKPGEPSWPCPWGKGRPGWHIECSAMAGTLLGASMEFPEVGRTPVPHHNELAKSEATLKRLGVQYFLH

SEQ ID NO: 839 - protein, 245 aa, human
  misc_feature (213)..(213): Xaa can be any naturally occurring amino acid
  misc_feature (234)..(234): Xaa can be any naturally occurring amino acid
  misc_feature (240)..(240): Xaa can be any naturally occurring amino acid
  misc_feature (243)..(243): Xaa can be any naturally occurring amino acid
  misc_feature (245)..(245): Xaa can be any naturally occurring amino acid
KNMEAKKLSKDRMKKYMARRKWQKTGNAVRAIGRLSSMAMISGLSGRKSSTGSPTSPLNAEKLESEEDVSQAFLEAVAEEKPHVKPYFSKTIRDLEVVEGSAARFDCKIEGYPDPEVVWFKDDQSIRESRHFQIDYDEDGNCSLIISDVCGDDDAKYTCKAVNSLGEATCTAELIVETMEIWEFSLCCKCQHQFCESEAKPGTMATGSSSRIXAHTKVVRMPSGFQRYIKVLLXGSIPMXAPXIX

SEQ ID NO: 840 - protein, 258 aa, human
  misc_feature (209)..(209): Xaa can be any naturally occurring amino acid
GTPSNLGKGRRAAAAADLANRSGESNTHQDIEEKDRLLRHVEARDLIEFGMIPEFVGRLPVVVPLHSLDEKTLVQILTEPRNAVIPQYQALFSMDKCELNVTEDALKAIARLALERKTGARGLRSIMEKLLLEPMFEVPNSDIVCVEVDKEVVEGKKEPGYIRAPTKESSEEEYDSGVEEEGWPRQADAANSTVILLSCIYSFSFFCLXSYLSLQSDIKSIGSILKSYMFREPLREDQIMISYITLIFGDVNGLNEPC

SEQ ID NO: 841 - protein, 261 aa, human
  misc_feature (227)..(227): Xaa can be any naturally occurring amino acid
  misc_feature (230)..(232): Xaa can be any naturally occurring amino acid
  misc_feature (241)..(241): Xaa can be any naturally occurring amino acid
  misc_feature (243)..(243): Xaa can be any naturally occurring amino acid
  misc_feature (255)..(255): Xaa can be any naturally occurring amino acid
  misc_feature (261)..(261): Xaa can be any naturally occurring amino acid
SKAALPDLTKVIQLKMDFTAARLQRGHLLLKQGKLDEAEDDFKKVLKSNPSENEEKEAQSQLIKSDEMQRLRSQALNAFGSGDYTAAIAFLDKILEVCVWDAELRELRAECFIKEGEPRKAISDLKAASKLKNDNTEAFYKISTLYYQLGDHELSLSEVRECLKLDQDHKRCFAHYKQVKKLNKLIESAEELIRDGRYTDATSKYESVMKTEPSIAEYTVRFKEKIXHCXXXDEKPCESYXVXSEVYRWTHVMPXRSSKAX

SEQ ID NO: 842 - protein, 244 aa, human
KRLFEEKADMIIYVVDNGQSVHFQTIFAAAQMIGWYDPKVTRVFHAGFGVVLGEDKKKFKTRSGETVRLMDLLGEGLKRSMDKLKEKERDKVLTAEELNAAQTSVAYGCIKYADLSHNRLNDYIFSFDKMLDDRGNTAAYLLYAFTRIRSIARLANIDEEMLQKAARETKILLDHEKEWKLGRCILRFPEILQKILDDLFLHTLCEYIYELATAFTEFYDSCYCVEKDRQTGKILKGDMWRMLL

SEQ ID NO: 843 - protein, 228 aa, human
  misc_feature (206)..(206): Xaa can be any naturally occurring amino acid
  misc_feature (228)..(228): Xaa can be any naturally occurring amino acid
TGEKPYTCKQCGKAFSVSSSLRRHETTHSAEKPYECKQCGKTFHHLGSFQIHMKRHTGDRPHKCKICGKGFDRPSLVRYHERIHTGEKPYECKQCGKTLSHSSSFRRHMIMHTGGGPHKCKICGKAFVYPSVCQRHEKSHSGEKPYECKQCGKALSHSSSFRRHMVMHTGDGPNKCKVCGKAFVYPSVCQRHEKTHWRETIMVTIXKPSIFPVPFDIMNKLTLDRNPX

SEQ ID NO: 844 - protein, 261 aa, human
  misc_feature (192)..(192): Xaa can be any naturally occurring amino acid
  misc_feature (196)..(196): Xaa can be any naturally occurring amino acid
  misc_feature (230)..(231): Xaa can be any naturally occurring amino acid
  misc_feature (259)..(259): Xaa can be any naturally occurring amino acid
  misc_feature (261)..(261): Xaa can be any naturally occurring amino acid
KEVMFLGEIEEILDVIEPTQFKKIEEPLFKQISKCVSSSHFQVAERALYFWNNEYILSLIEENIDKILPIMFASLYKISKEHWNPTIVALVYNVLKTLMEMNGKLFDDLTSSYKAERQREKKKELEREELWKKLEELKLKKALEKQNSAYNMHSILSNTSAEKKSLPPLPDRQSFVCFFEICKNYKNNLISXIIKXPFFLATGNGKIYGLNVALCCIMAIVYCNPLSIMXXYVSLSSQKGMILSSMIENNMGVEYDKSXDX

SEQ ID NO: 845 - protein, 149 aa, human
KMEQEKHNQQSEFTVESLIATVTDMFGAGTETTSTTLRYGLLLLLKYPEVTAKVQEEIECVVGRNRSPCMQDRSHMPYTDAVVHEIQRYIDLLPTNLPHAVTCDVKFKNYLIPKVGFISDEEFPHVFLKETYSISVINPSINFSVLVDI

SEQ ID NO: 846 - protein, 159 aa, human
  misc_feature (11)..(12): Xaa can be any naturally occurring amino acid
  misc_feature (15)..(16): Xaa can be any naturally occurring amino acid
  misc_feature (20)..(20): Xaa can be any naturally occurring amino acid
  misc_feature (24)..(24): Xaa can be any naturally occurring amino acid
  misc_feature (45)..(45): Xaa can be any naturally occurring amino acid
  misc_feature (49)..(50): Xaa can be any naturally occurring amino acid
  misc_feature (53)..(53): Xaa can be any naturally occurring amino acid
  misc_feature (63)..(64): Xaa can be any naturally occurring amino acid
  misc_feature (67)..(67): Xaa can be any naturally occurring amino acid
  misc_feature (86)..(88): Xaa can be any naturally occurring amino acid
  misc_feature (118)..(118): Xaa can be any naturally occurring amino acid
  misc_feature (130)..(130): Xaa can be any naturally occurring amino acid
  misc_feature (135)..(135): Xaa can be any naturally occurring amino acid
  misc_feature (159)..(159): Xaa can be any naturally occurring amino acid
QHHDHQLSGPXXLLXXPIHXRILXLQVHLIMTQKITLKIFIALLXGSLXXFFXSASVAKKIMXXKGXPPKDDGDSMCGGPGMSDPXXXRDATDSSQTALDNKASLLHSMPTHSSPRSXDYNPYNYSDSIXPFNKXALKEAMFDDDADQFPDDLSLDHSX

SEQ ID NO: 847 - protein, 166 aa, human
  misc_feature (166)..(166): Xaa can be any naturally occurring amino acid
RPPSRPALGRGVDQALPQERRAPVTPSSASRYHRRRSSGSRDERYRSDVHTEAVQAALAKHKERKMAVPMPSKRRSLVVQTSMDAYTPPDTSSGSEDEGSVQGDSQGTPTSSQGSINMEHWISQAIHGSTTSTTSSSSTQSGGSGAAHRLADVMAQTHIENHSAPX

SEQ ID NO: 848 - protein, 355 aa, human
  misc_feature (157)..(157): Xaa can be any naturally occurring amino acid
  misc_feature (355)..(355): Xaa can be any naturally occurring amino acid
PTRPEPGTVPFDRVLLNDGGYYDPETGVFTAPLAGRYLLSAVLTGHRHEKVEAVLSRSNQGVARVDSGGYEPEGLENKPVAESQPSPGTLGVFSLILPLQAGDTVCVDLVMGQLAHSEEPLTIFSGALLYGDPELEHATGVPPDVSTSAEKTAGAAXSWGSPERATHHMTAPHLAQTSLPHNSLLPNSSHTNKRPHLPHRKSTIHPQDTITPLNPPCRTNIEKNDPHTAHLTAHPTHPHTLRPTNITTEHNTHSQQSTPRPQQSQTQHHYNTDYCTHPNNYCILPPRQTTTHNTHTTAPTPPTILTPLRFTDVSPTPHTHTGPEEPPEMNPPPSPETQSAPYKLIGTYPTTVHLX

SEQ ID NO: 849 - protein, 388 aa, human
  misc_feature (388)..(388): Xaa can be any naturally occurring amino acid
TVLDENKNTALHLACSKGHEKCALMILAETQDLGLINATNSALQMPLHIAARNGLASVVQALLSHGATVLAVDEEGHTPALACAPNKDVADCLALILSTMKPFPPKDAVRSINIPPLNTLNHQSPTRHIHHSQTCKPLCLARLHNTNTHKTPSNTPVHSLTYKTPTNKTNHLLTLTLTPSPYILRLTTSTFYLQKKPSNHTNHQTTHRLILHSHHLTANLSPNRTINTTTLHLQLHPTNSLHTTRNRHQSSNQIPHTLHPPILTLSKILYQHPPHPNLLPTITPPSPRYHTHLPPPHNLQPPTPLPYHPYLNLQTHTPQQYRTPTSSPFKPPSHIYPYHTLHLSLSQQHSLLYTNSNRKSTPQSPINSPYNIRTLHTMSYCYYYTHEX

SEQ ID NO: 850 - protein, 417 aa, human
  misc_feature (417)..(417): Xaa can be any naturally occurring amino acid
EEQRSFELAAMEETRIVILNNLEELKQKIKDINDQMDESFRELDMECALLDGEQKSETTELMKEKEILDHLNRKIAELEKNIVGEKTKEKVKLDAEREKLERLQELYSEQKTQLDNCPESMREQLQQQLKRDADLLDVESKHFEDLEFQQLEHESRLDEEKENLTQQLLRESAEYQRNIVSRKKKISALKNKPITLFNRLKKTKNILGKKRIIKGCCKEKRESFEIWKKKTPPPRGGKGSPVTPKLKKNSPPKPNPCATEPPQTGVGEPPPKRKKPLKFGKKEKNPLKKAPPPGEIFPPKKKTFFPSPHFSRGLIGGENPPQGPLFSRKKKNLGGGAPPPPGGRGEINIPGASRVFPPPQRGAPPAKNFFFSSRPRNKQTNKKSLFQKNPQERRLLFLPPNFFRGKTSFSFPTKNFX

SEQ ID NO: 851 - protein, 434 aa, human
  misc_feature (215)..(215): Xaa can be any naturally occurring amino acid
  misc_feature (217)..(217): Xaa can be any naturally occurring amino acid
  misc_feature (221)..(221): Xaa can be any naturally occurring amino acid
  misc_feature (231)..(231): Xaa can be any naturally occurring amino acid
  misc_feature (264)..(266): Xaa can be any naturally occurring amino acid
  misc_feature (295)..(295): Xaa can be any naturally occurring amino acid
  misc_feature (297)..(297): Xaa can be any naturally occurring amino acid
  misc_feature (301)..(301): Xaa can be any naturally occurring amino acid
  misc_feature (303)..(304): Xaa can be any naturally occurring amino acid
  misc_feature (310)..(310): Xaa can be any naturally occurring amino acid
  misc_feature (343)..(343): Xaa can be any naturally occurring amino acid
  misc_feature (376)..(376): Xaa can be any naturally occurring amino acid
  misc_feature (388)..(388): Xaa can be any naturally occurring amino acid
  misc_feature (395)..(395): Xaa can be any naturally occurring amino acid
HMQTQDGEKFYECKACGKPFTESSYLTQHLRTHSRVLPIEHKKFGKAFAFSPDLAKHIRLRTRGKHYVCNECGKEFTCFSKLNIHIRVHTGEKPYECNKCGKAFTDSSGLIKHRRTHTGEKPYECKECGKAFANSSHLTVHMRTHTGEKPYQCKECGKAFINSSSFKSHMQTHPGVKPYDCQQCGKAFIRSSFLIRHLRSHSAERPFECEECGKXFXYSSXLNQHKTIHTXVEPIKLSQGWASLQHFLHASPPHTPTRLLAFMXXXPPLFSPLSKIPPFSFSSHPHSIFITSLTXFXSLPXPXXPSQPPXSSSSQSFIPPLFFNHTPLLPHLPTTPQFSSPPXISIFTTHPPSLPPPSPSFPSYPSPFSYLTLTTXFIPPPLPPTFPXNHHIYLXYYPLLPYSPLFLTTSSNHLLSFFSPHLILTFIPSLLHSP

SEQ ID NO: 852 - protein, 298 aa, human
  misc_feature (262)..(262): Xaa can be any naturally occurring amino acid
  misc_feature (277)..(277): Xaa can be any naturally occurring amino acid
  misc_feature (279)..(279): Xaa can be any naturally occurring amino acid
  misc_feature (284)..(284): Xaa can be any naturally occurring amino acid
  misc_feature (290)..(290): Xaa can be any naturally occurring amino acid
  misc_feature (293)..(293): Xaa can be any naturally occurring amino acid
GRQTPAGTPATASMQGEESLRILVEPEGDSFPLMEISTCETEASEQWDYVLVAQRHTQRDPRQARQQQFLEELRRKGFHIKVIRDQKQVFFGIRADNSVFGLYRTLLLEPEGPAPHAELAAPTTIPVTTRIRIVNFVVMNNKTSAGETFEDLMKGRGLGQVPPAQGEGWAGLERALGWDPGMGALTLCHPSQGEGRLKKTWARWRHMFREQPVDEIRNYFGEKVALYFVWLGWYPYLLVPAALTGLLVFLSGFSLVEARQIXKEICEAPTSSWVPSXTXPAGPXVLRNLXFCXSPPLF

SEQ ID NO: 853 - protein, 400 aa, human
  misc_feature (386)..(386): Xaa can be any naturally occurring amino acid
  misc_feature (400)..(400): Xaa can be any naturally occurring amino acid
EQIVTWLISLGVLESPKKTICDPEEFLKSSLKNGVVLCKLINRLMPGSVEKFCLDPQTEADCINNINDFLKGCATLQVEIFDPDDLYSGVNFSKVLSTLLAVNKATEDQLSERPCGRSSSLSAANTSQTNPQGAVSSTVSGLQRQSKTVEMTENGSHQLIVKARFHFKQTNEDELSVCKGGLLLRPTIKRSWWERPINGKTGCSPKIWPGIKTRGGSSPFFPRLEEKGGNYFTQNLASPGKKTLPPKPPKRLKTPPSKKNNNRGGLKKTSRPEKKIFKNPPPPFVLFKNPPAHKNTEPPGGGTLLSRHTSTKNTLFHNPPLHHPQELYIFPTKPKTHVGPLHPPPPLYNKLPMFHPPNKTPIPLYNHTPPNIPFIIYLHNTKTHTXRPSPSFSSTSPYTX

SEQ ID NO: 854 - protein, 402 aa, human
  misc_feature (355)..(356): Xaa can be any naturally occurring amino acid
  misc_feature (360)..(360): Xaa can be any naturally occurring amino acid
  misc_feature (366)..(366): Xaa can be any naturally occurring amino acid
  misc_feature (377)..(377): Xaa can be any naturally occurring amino acid
  misc_feature (379)..(380): Xaa can be any naturally occurring amino acid
  misc_feature (382)..(383): Xaa can be any naturally occurring amino acid
  misc_feature (393)..(396): Xaa can be any naturally occurring amino acid
  misc_feature (402)..(402): Xaa can be any naturally occurring amino acid
RSFPTLPTLTESRFPDPRMHYPGAMSAAFPYSATPSGTSISSLSVAGMPATSRFHHTYLPPPYPGAPQNQSGPFQANPSPYHLYYGTSSGSYQFSMVAGSSSGGDRSPTRMLASCTSSAASVAAGNLMNPSLGGQSDGVEADGSHSNSPTALSTPGRMDEAVWRPYPPWWTPPAGGGDPNNLQDQWAGSEAPGGNGTCAPGWSRSQGGPSWWEPLAASVQPHPCTEAVTTPTPARDTAPGPDPGRLIPYFGGGTASCQPPGRTPCLHLAQWRLEPRLLGQRHLSSKKRNMAQGKTPGPGNPPNRDLSWNPSPGQAPLINKNWSKRKGPPPHHPEGVPPVKRGRPTPVGKKVKNKXXPRQXPPIKGXFPTEVPPQKKXLXXFXXKRIRGPLGYXXXXVFVGGX

SEQ ID NO: 855 - protein, 233 aa, human
ADSTIMDIQVPTRAPDAVYTELQPTSPTPTWPADETPQPQTQTQQLEGTDGPLVTDPETHKSTKAAHPTDDTTTLSERPSPSTDVQTDPQTLKPSGFHEDDPFFYDEHTLRKRGLLVAAVLFITGIIILTSGKCRQLSRLCRNHCRVHQKQELTTCWAPEDQAPCQLTVPSLLHPLEEPGQRGKTQMMKLEPGLPVRVSYLPQPCPPLKATWRLGGCPSSYLLCDKKSTVVFA

SEQ ID NO: 856 - protein, 429 aa, human
  misc_feature (236)..(236): Xaa can be any naturally occurring amino acid
  misc_feature (247)..(247): Xaa can be any naturally occurring amino acid
  misc_feature (263)..(263): Xaa can be any naturally occurring amino acid
  misc_feature (269)..(269): Xaa can be any naturally occurring amino acid
  misc_feature (290)..(290): Xaa can be any naturally occurring amino acid
  misc_feature (422)..(422): Xaa can be any naturally occurring amino acid
  misc_feature (426)..(426): Xaa can be any naturally occurring amino acid
  misc_feature (428)..(428): Xaa can be any naturally occurring amino acid
DLKKGKRTQSNDTSLDSGVDMNELHSSRKLEREKTFIKSMHQPKILYLEDLDLSSSESGTTVCSPEDPALRHILDGGSGVIMEHPGEESPGRKSTVEDFEANTSPTKRRGRPPLAKRDSKTNIWKKREERPLIPINLQWGLCVCCLVLFILASCCKLQYELKKMRLSNLMVLGHVSSRVNGNSVIREKDTKECFFWPIHLFLGDEFTVSKFSKCKIASRCLSENVAQPASLALTLXRITVKYILLKXPPKMLPLPWLPHGTFXNKLTSXIIFLNVLLRLLLPNKLDNDWXGTPELSQKNGGWPNHGDGSSQRKSNLKKRAKTHWPKGNPPLGGLGKPPKREGFLKLEKGPNGFFKIFSPPKREFVGGIFLKKPCFLGPALLAGVKFFLKTRRLGEIKGRVFPKMRTNFFLDKKKFLSIRDFXLEKXKXP

SEQ ID NO: 857 - protein, 209 aa, human
  misc_feature (173)..(173): Xaa can be any naturally occurring amino acid
  misc_feature (176)..(176): Xaa can be any naturally occurring amino acid
  misc_feature (190)..(190): Xaa can be any naturally occurring amino acid
  misc_feature (198)..(198): Xaa can be any naturally occurring amino acid
  misc_feature (202)..(209): Xaa can be any naturally occurring amino acid
EGSEEKGPEVREYREKVETELQGVCDTVLGLLDSHLIKEAGDAESRVFYLKMKGDYYRYLAEVATGDDKKRIIDSARSAYQEAMDISKKEMPPTNPIRLGLALNFSVFHYEIANSPEEAISLAKTTFDEAMADLHTLSEDSYKDSTLIMQLLRDNLTLWTADNAGEEGGEAPXEPXSGGPATAPPGPPQXPTPPRGQXGGGXXXXXXXX

SEQ ID NO: 858 - protein, 237 aa, human
METRGPQGAANPMDSSRSLGDLGPFPREVGRGAPLAPGARNPATAGASRSQGGGHEDRTADRALGPRAGEELDRESWVREKVLFLLHPERWLGTRGDPAREEVAGAEDLPHAGGEDHGEEPNYPSVFQREKRISGRRVAPPRDAADPPKYVLVRVEDYQVTQEVLQTSWAKGRMTTRTEEHFVTALTFRSSREGQPGERWGPAESRALQARTGASRVHAAGRRVSPSPGTWLEEIKL

SEQ ID NO: 859 - protein, 92 aa, human [sequence omitted]

SEQ ID NO: 860 - protein, 306 aa, human [sequence omitted]

SEQ ID NO: 861 - protein, 101 aa, human
MGFVKVVKNKAYFKRYQVKFRRRREGKTDYYARKRLVIQDKNKYNTPKYRMIVRVTNRDIICQIAYARIEGDMIVCAAYAHELPKYGVKVGLTNYAAAKWR

SEQ ID NO: 862 - protein, 107 aa, human
MARAALSAAPSNPRLLRVALLLLLLVAAGRRAAGASVATELRCQCLQTLQGIHPKNIQSVNVKSPGPHCAQTEVIATLKNGRKACLNPASPIVKKIIEKMLNSDKSN

SEQ ID NO: 863 - protein, 126 aa, human
MSIGVPIKVLHEAEGHIVTCETNTGEVYRGKLIEAEDNMNCQMSNITVTYRDGRVAQLEQVYIRGSKIRFLILPDMLKNAPMLKSMKNKNQGSGAGRGKAAILKAQVAARGRGRGMGRGNIFQKRR

SEQ ID NO: 864 - protein, 227 aa, human; identical to SEQ ID NO: 757
  misc_feature (226)..(227): Xaa can be any naturally occurring amino acid

SEQ ID NO: 865 - protein, 269 aa, human; identical to SEQ ID NO: 699
  misc_feature (268)..(269): Xaa can be any naturally occurring amino acid

SEQ ID NO: 866 - protein, 285 aa, human; identical to SEQ ID NO: 764
  misc_feature (285)..(285): Xaa can be any naturally occurring amino acid

SEQ ID NO: 867 - protein, 393 aa, human; identical to SEQ ID NO: 721
  misc_feature (274)..(274): Xaa can be any naturally occurring amino acid
  misc_feature (278)..(278): Xaa can be any naturally occurring amino acid
  misc_feature (287)..(287): Xaa can be any naturally occurring amino acid
  misc_feature (298)..(298): Xaa can be any naturally occurring amino acid
  misc_feature (300)..(300): Xaa can be any naturally occurring amino acid
  misc_feature (308)..(308): Xaa can be any naturally occurring amino acid
  misc_feature (310)..(310): Xaa can be any naturally occurring amino acid
  misc_feature (312)..(312): Xaa can be any naturally occurring amino acid
  misc_feature (318)..(318): Xaa can be any naturally occurring amino acid
  misc_feature (321)..(321): Xaa can be any naturally occurring amino acid
  misc_feature (323)..(323): Xaa can be any naturally occurring amino acid
  misc_feature (331)..(331): Xaa can be any naturally occurring amino acid
  misc_feature (338)..(338): Xaa can be any naturally occurring amino acid
  misc_feature (342)..(343): Xaa can be any naturally occurring amino acid
  misc_feature (347)..(347): Xaa can be any naturally occurring amino acid
  misc_feature (351)..(352): Xaa can be any naturally occurring amino acid
  misc_feature (356)..(358): Xaa can be any naturally occurring amino acid
  misc_feature (360)..(360): Xaa can be any naturally occurring amino acid
  misc_feature (367)..(372): Xaa can be any naturally occurring amino acid
  misc_feature (374)..(375): Xaa can be any naturally occurring amino acid
  misc_feature (377)..(377): Xaa can be any naturally occurring amino acid
  misc_feature (379)..(379): Xaa can be any naturally occurring amino acid
  misc_feature (382)..(383): Xaa can be any naturally occurring amino acid
  misc_feature (391)..(391): Xaa can be any naturally occurring amino acid
  misc_feature (393)..(393): Xaa can be any naturally occurring amino acid

SEQ ID NO: 868 - protein, 268 aa, human
AEAGALGSARPAAIRGGTRRRATIMPGHLQEGFGCVVTNRFDQLFDDESDPFEVLKAAENKKKEAGGGGVGGPGAKSAAQAAAQTNSNAAGKQLRKESQKDRKNPLPPSVGVVDKKEETQPPVALKKEGIRRVGRRPDQQLQGEGKIIDRRPERRPPRERRFEKPLEEKGEGGEFSVDRPIIDRPIRGRGGLGRGRGGRGRGMGRGDGFDSRGKREFDRHSGSDRSGLKHEDKRGGSGSHNWGTVKDELTESPKYIQKQISYNYSDLD

SEQ ID NO: 869 - protein, 357 aa, human; identical to SEQ ID NO: 734
  misc_feature (216)..(216): Xaa can be any naturally occurring amino acid
  misc_feature (222)..(222): Xaa can be any naturally occurring amino acid
  misc_feature (240)..(240): Xaa can be any naturally occurring amino acid
  misc_feature (246)..(246): Xaa can be any naturally occurring amino acid
  misc_feature (248)..(248): Xaa can be any naturally occurring amino acid
  misc_feature (252)..(252): Xaa can be any naturally occurring amino acid
  misc_feature (254)..(255): Xaa can be any naturally occurring amino acid
  misc_feature (265)..(265): Xaa can be any naturally occurring amino acid
  misc_feature (270)..(270): Xaa can be any naturally occurring amino acid
  misc_feature (272)..(272): Xaa can be any naturally occurring amino acid
  misc_feature (279)..(279): Xaa can be any naturally occurring amino acid
  misc_feature (281)..(281): Xaa can be any naturally occurring amino acid
  misc_feature (284)..(284): Xaa can be any naturally occurring amino acid
  misc_feature (288)..(288): Xaa can be any naturally occurring amino acid
  misc_feature (290)..(291): Xaa can be any naturally occurring amino acid
  misc_feature (294)..(294): Xaa can be any naturally occurring amino acid
  misc_feature (297)..(297): Xaa can be any naturally occurring amino acid
  misc_feature (301)..(302): Xaa can be any naturally occurring amino acid
  misc_feature (306)..(306): Xaa can be any naturally occurring amino acid
  misc_feature (311)..(311): Xaa can be any naturally occurring amino acid
  misc_feature (324)..(324): Xaa can be any naturally occurring amino acid
  misc_feature (329)..(329): Xaa can be any naturally occurring amino acid
  misc_feature (332)..(332): Xaa can be any naturally occurring amino acid
  misc_feature (334)..(334): Xaa can be any naturally occurring amino acid
  misc_feature (336)..(336): Xaa can be any naturally occurring amino acid
  misc_feature (339)..(339): Xaa can be any naturally occurring amino acid
  misc_feature (343)..(345): Xaa can be any naturally occurring amino acid
  misc_feature (348)..(348): Xaa can be any naturally occurring amino acid
  misc_feature (350)..(350): Xaa can be any naturally occurring amino acid
  misc_feature (353)..(353): Xaa can be any naturally occurring amino acid
  misc_feature (356)..(357): Xaa can be any naturally occurring amino acid

SEQ ID NO: 870 - protein, 430 aa, human; identical to SEQ ID NO: 763

1.-15. (canceled)

16. A method for identifying markers for Neuromelitis Optica (NMO) comprising
a) exposing a marker candidate for NMO to sample(s) of NMO patient(s), measuring the bonding of the marker candidate by immunofluorescent assay and determining the median fluorescence intensity (MFI) for the marker candidate;
b) exposing the same marker candidate to control sample(s), measuring the bonding of the marker candidate by immunofluorescent assay and determining the median fluorescence intensity (MFI) for the marker candidate;
c) processing MFI data from steps a) and b) by univariate analysis;
d) processing MFI data from steps a) and b) by multivariate analysis;
e) combining the data obtained by univariate analysis and multivariate analysis and identify thereby marker(s) for NMO.

17. The method according to claim 16, further comprising the step
f) according to which selecting the marker from the group of markers comprising SEQ ID NOS: 1 to 87 and 262 to 464 (clone sequences), SEQ ID NOS: 88 to 174 and 465 to 667 (RNA sequences), SEQ ID NOS: 175 to 261 and 668 to 870 (protein sequences).

18. The method according to claim 16 wherein the processing of MFI data is performed by univariate analysis based on EST (exploratory statistics and testing) and/or by volcano plot, and wherein the processing of MFI data by multivariate analysis is performed by partial least squares discriminant analysis (PLS-DA) and/or powered PLS-DA.

19. The method according to claim 16 wherein univariate analysis of MFI data of a marker candidate comprises one or more parameters selected from p-value, fold change, effect size, Fisher's ratio, area under the curve (AUC), median absolute MFI within the group, and the univariate Mann-Whitney U test.

20. The method according to claim 16 wherein control samples are selected from healthy persons and/or persons with MS.

21. The marker for NMO identified by a method according to claim 16, wherein the marker is selected from the group consisting of SEQ ID NOS: 1 to 87 and 262 to 464 (clone sequences), SEQ ID NOS: 88 to 174 and 465 to 667 (RNA sequences), SEQ ID NOS: 175 to 261 and 668 to 870 (protein sequences), partial sequences of SEQ ID NOS: 1 to 261 and 262 to 870 and homologous of SEQ ID NOS: 1 to 261 and 262 to 870, preferably selected from the group of SEQ ID NOS: 1 to 16, SEQ ID NOS: 262 to 279, SEQ ID NOS: 88 to 103, SEQ ID NOS: 465 to 482, SEQ ID NOS: 175 to 190, SEQ ID NOS: 668 to 685, SEQ ID NOS: 45 to 63, SEQ ID NOS: 360 to 375, SEQ ID NOS: 132 to 150, SEQ ID NOS: 563 to 578, SEQ ID NOS: 219 to 237, and SEQ ID NOS: 766-785.

22. A marker for discriminating MNO from Multiple Sclerosis, wherein the marker is identified by a method according to claim 16 and is selected from the group consisting of SEQ ID NOS: 1 to 44, SEQ ID NOS: 88 to 131, SEQ ID NOS: 175 to 218, SEQ ID NOS: 262 to 359, SEQ ID NOS: 465 to 562, SEQ ID NOS: 668 to 765, partial sequences and homologous thereof, preferably selected from the group of SEQ ID NOS: 1 to 16, SEQ ID NOS: 88 to 103, SEQ ID NOS: 175 to 190, SEQ ID NOS: 262 to 279, SEQ ID NOS: 465 to 482, SEQ ID NOS: 668 to 685, and partial sequences and homologous thereof.

23. A marker for discriminating NMO from the healthy state wherein the marker is identified by a method according to claim 16 and selected from the group comprising SEQ ID NOS: 45 to 87, SEQ ID NOS: 132 to 174, SEQ ID NOS: 219 to 261, SEQ ID NOS: 360 to 464, SEQ ID NOS: 563 to 667, SEQ ID NOS: 766 to 870, partial sequences and homologous thereof, preferably selected from the group of SEQ ID NOS: 45 to 63, SEQ ID NOS: 132 to 150, SEQ ID NOS: 219 to 237, SEQ ID NOS: 360 to 375, SEQ ID NOS: 563 to 578, SEQ ID NOS: 766 to 785, and partial sequences and homologous thereof.

24. Use of one or more marker(s) for NMO selected from the group comprising SEQ ID NOS: 1 to 87 and 262 to 464 (clone sequences), SEQ ID NOS: 88 to 174 and 465 to 667 (RNA sequences), SEQ ID No. 175 to 261 and 668 to 870 (protein sequences), partial sequences of SEQ ID NOS: 1 to 261 and 262 to 870 and homologous of SEQ ID NOS: 1 to 261 and 262 to 870, preferably selected from the group of SEQ ID NOS: 1 to 16, SEQ ID NOS: 262 to 279, SEQ ID NOS: 88 to 103, SEQ ID NOS: 465 to 482, SEQ ID NOS: 175 to 190, SEQ ID NOS: 668 to 685, SEQ ID NOS: 45 to 63, SEQ ID NOS: 360 to 375, SEQ ID NOS: 132 to 150, SEQ ID NOS: 563 to 578, SEQ ID NOS: 219 to 237, SEQ ID NOS: 766-785 as diagnostic agent, for use in diagnosis of MNO, for prognosis in NMO, for determination of treatment of NMO, for surveillance of treatment of MNO, for stratification in NMO, for therapy control or prediction of prognosis of NMO covering decisions for the treatment and therapy of the patient, in particular the hospitalization of a patient with NMO, for decision of use, effect and/or dosage of one or more drugs, for use as a therapeutic measure or the monitoring of the course of the disease and/or the course of therapy, for etiology or classification of NMO optionally together with prognosis, optionally together with one or more markers for NMO like for example AQP-4.

25. A diagnostic agent or test kit comprising one or more marker(s) for NMO selected from the group consisting of SEQ ID NOS: 1 to 87 and 262 to 464 (clone sequences), SEQ ID NOS: 88 to 174 and 465 to 667 (RNA sequences), SEQ ID NOS: 175 to 261 and 668 to 870 (protein sequences), partial sequences of SEQ ID NOS: 1 to 261 and 262 to 870 and homologous of SEQ ID NOS: 1 to 261 and 262 to 870, preferably selected from the group of SEQ ID NOS: 1 to 16, SEQ ID NOS: 262 to 279, SEQ ID NOS: 88 to 103, SEQ ID NOS: 465 to 482, SEQ ID NOS: 175 to 190, SEQ ID NOS: 668 to 685, SEQ ID NOS: 45 to 63, SEQ ID NOS: 360 to 375, SEQ ID NOS: 132 to 150, SEQ ID NOS: 563 to 578, SEQ ID NOS: 219 to 237, and SEQ ID NOS: 766-785 and optionally further substances and/or additives.

26. A panel of markers comprising one or more marker(s) for NMO selected from the group consisting of SEQ ID NOS: 1 to 87 and 262 to 464 (clone sequences), SEQ ID NOS: 88 to 174 and 465 to 667 (RNA sequences), SEQ ID NOS: 175 to 261 and 668 to 870 (protein sequences), partial sequences of SEQ ID NOS: 1 to 261 and 262 to 870 and homologous of SEQ ID NOS: 1 to 261 and 262 to 870, preferably selected from the group of SEQ ID NOS: 1 to 16, SEQ ID NOS: 262 to 279, SEQ ID NOS: 88 to 103, SEQ ID NOS: 465 to 482, SEQ ID NOS: 175 to 190, SEQ ID NOS: 668 to 685, SEQ ID NOS: 45 to 63, SEQ ID NOS: 360 to 375, SEQ ID NOS: 132 to 150, SEQ ID NOS: 563 to 578, SEQ ID NOS: 219 to 237, and SEQ ID NOS: 766 to 785.

27. Assay or protein array comprising a panel of marker(s) according to claim 26, characterized in that the marker(s) is/are applied to a solid support, in particular a filter, a membrane, a bead or microsphere like for example a magnetic or fluorophore-labeled bead, a silica wafer, glass, metal, ceramics, plastics, a chip, a target for mass spectrometry or a matrix.

28. Use of a panel of markers according to claim 26 or an assay or protein array according to claim 27 for the identification and/or validation of an active agent for the prevention or treatment of NMO wherein the panel or the assay or protein array contains means for detecting a binding success, characterized in that the panel or assay or protein array a.) is brought into contact with at least one substance to be tested and b.) a binding success is detected.

29. A method for detecting MNO comprising
a. providing at least one marker for NMO selected from the group comprising SEQ ID NOS: 1 to 87 and 262 to 464 (clone sequences), SEQ ID NOS: 88 to 174 and 465 to 667 (RNA sequences), SEQ ID NOS: 175 to 261 and 668 to 870 (protein sequences), partial sequences of SEQ ID NOS: 1 to 261 and 262 to 870 and homologous of SEQ ID NOS: 1 to 261 and 262 to 870, preferably selected from the group of SEQ ID NOS: 1 to 16, SEQ ID NOS: 262 to 279, SEQ ID NOS: 88 to 103, SEQ ID NOS: 465 to 482, SEQ ID NOS: 175 to 190, SEQ ID NOS: 668 to 685, SEQ ID NOS: 45 to 63, SEQ ID NOS: 360 to 375, SEQ ID NOS: 132 to 150, SEQ ID NOS: 563 to 578, SEQ ID NOS: 219 to 237, SEQ ID NOS: 766-785,
b. bringing the one or more marker(s) into contact with body fluid or tissue extract of a person, for example a patient and
c. detecting an interaction of the body fluid or tissue extract with the marker(s) from a.).

30. A target for the treatment and/or therapy of NMO selected from the group comprising SEQ ID NOS: 1 to 87 and 262 to 464 (clone sequences), SEQ ID NOS: 88 to 174 and 465 to 667 (RNA sequences), SEQ ID NOS: 175 to 261 and 668 to 870 (protein sequences), partial sequences of SEQ ID NOS: 1 to 261 and 262 to 870 and homologues of SEQ ID NOS: 1 to 261 and 262 to 870, preferably selected from the group consisting of SEQ ID NOS: 1 to 16, SEQ ID NOS: 262 to 279, SEQ ID NOS: 88 to 103, SEQ ID NOS: 465 to 482, SEQ ID NOS: 175 to 190, SEQ ID NOS: 668 to 685, SEQ ID NOS: 45 to 63, SEQ ID NOS: 360 to 375, SEQ ID NOS: 132 to 150, SEQ ID NOS: 563 to 578, SEQ ID NOS: 219 to 237, and SEQ ID NOS: 766-785.
